(19) United States
(12) Patent Application Publication
(10) Pub. No.: US 2002/0177568 A1
(43) Pub. Date: Nov. 28, 2002

(54) Enzymatic nucleic acid treatment of diseases or conditions related to levels of NF-kappa B

(76) Inventors: Dan T. Stinchcomb, Ft. Collins, CO (US); James McSwiggen, Boulder, CO (US); Kenneth G. Draper, Reno, NV (US)

Correspondence Address: MCDONNELL BOEHNEN HULBERT & BERGHOFF, 300 SOUTH WACKER DRIVE, SUITE 3200, CHICAGO, IL, 60606, US

(21) Appl. No.: 09/864,785

(22) Filed: May 23, 2001

Related U.S. Application Data
(63) Continuation-in-part of application No. 08/777,916, filed on Dec. 23, 1996.
Application No. 08/777,916 is a continuation of application No. 08/291,932, filed on Aug. 15, 1994.
Application No. 08/291,932 is a continuation-in-part of application No. 08/245,466, filed on May 18, 1994, now abandoned.
Application No. 08/245,466 is a continuation-in-part of application No. 07/987,132, filed on Dec. 7, 1992, now abandoned.

(51) Int. Cl. C07H 21/04; A61K 48/00

(52) U.S. Cl. 514/44; 536/23.2

(57) ABSTRACT

The present invention relates to nucleic acid molecules, including antisense and enzymatic nucleic acid molecules, such as hammerhead ribozymes, DNAzymes, allozymes and antisense, which modulate the expression or function of NFKB genes, such as REL-A, REL-B, REL (c-rel), NFKB1 (p105/p50) and NFKB2 (p100)/p52/p49).

[0001] RELATED APPLICATIONS

[0002] This application is a continuation-in-part of Stinchcomb et al., U.S. Ser. No. 08/777,916, filed Dec. 23, 1996 entitled “Ribozyme Treatment of Diseases or Conditions Related to Levels of NFKB”, which is a continuation of Stinchcomb et al., U.S. Ser. No. 08/291,932, filed Aug. 15, 1994, now U.S. Pat. No. 5,658,780 entitled “REL A Targeted Ribozymes”, which is a continuation-in-part of U.S. Ser. No. 08/245,466 filed May 18, 1994, entitled “Method and Composition for Treatment of Restenosis and Cancer Using Ribozymes,” which is a continuation-in-part of Draper, U.S. Ser. No. 07/987,132 filed Dec. 7, 1992, entitled “Method and Reagent for Treatment of a Stenotic Condition”. These applications are hereby incorporated by reference herein in their entirety including the drawings.

### SEQUENCE LISTING

[0003] The Sequence Listing file named “MBHB00-812D.SeqListing” submitted in duplicate on Compact Disc-Recordable (CD-R) medium (CD entitled “010518_{—}1002”) in compliance with 37 C.F.R. §1.52(e) is incorporated herein by reference. The sequence listing file is 1,021,000 bytes in size.

### FIELD OF THE INVENTION

[0004] The present invention relates to therapeutic compositions and methods for the treatment or diagnosis of diseases or conditions related to NF-kappa B (NFKB) levels, such as cancer, inflammatory, and autoimmune diseases and/or disorders.

### BACKGROUND OF THE INVENTION

[0005] The following is a brief description of the physiological role of NFKB. The discussion is provided only for understanding the invention that follows. This summary is not an admission that any of the work described below is prior art to the claimed invention.

[0006] Nuclear factor kappa B (NFKB) is a multiunit transcription factor which regulates the expression of genes involved in a number of physiologic and pathologic processes. NFKB is a key component of the TNF signaling pathway. These processes include, but are not limited to: apoptosis, immune, inflammatory and acute phase responses. The REL-A gene product (a.k.a. RelA or p65), and p50 subunits of NFKB, have been implicated in the induction of inflammatory responses and cellular transformation. NFKB exists in the cytoplasm as an inactive heterodimer of the p50 and p65 subunits. NFKB is complexed with its inhibitory protein, IkappaB, until activated by the appropriate stimuli. NFKB activation can occur following stimulation of a variety of cell types by inflammatory mediators, for example TNF and IL-1, and reactive oxygen intermediates. In response to induction, NFKB can stimulate production of pro-inflammatory cytokines such as TNF-alpha, IL-1-beta, IL-6 and iNOS, thereby perpetuating a positive feedback loop. NFKB appears to play a role in a number of disease processes including: ischemia/reperfusion injury (CNS and myocardial), glomerulonephritis, sepsis, allergic airway inflammation, inflammatory bowel disease, infection, arthritis, and cancer.

[0007] The nuclear DNA-binding protein, NFKB, was first identified as a factor that binds and activates the immunoglobulin kappa light chain enhancer in B cells. NFKB now is known to activate transcription of a variety of other cellular genes (e.g., cytokines, adhesion proteins, oncogenes and viral proteins) in response to a variety of stimuli (e.g., phorbol esters, mitogens, cytokines and oxidative stress). In addition, molecular and biochemical characterization of NFKB has shown that the activity is due to a homodimer or heterodimer of a family of DNA binding subunits. Each subunit bears a stretch of 300 amino acids that is homologous to the oncogene, v-rel. The activity first described as NFKB is a heterodimer of p49 or p50 with p65. The p49 and p50 subunits of NFKB (encoded by the NF-kappa B2 or NF kappa B1 genes, respectively) are generated from the precursors NFKB1 (p105) or NFKB2 (p100). The p65 subunit of NFKB (now termed REL-A) is encoded by the rel-A locus.

[0008] The roles of each specific transcription-activating complex now are being elucidated in cells (Perkins, et al., 1992, Proc. Natl. Acad. Sci USA, 89, 1529-1533). For instance, the heterodimer of NFKB1 and Rel A (p50/p65) activates transcription of the promoter for the adhesion molecule, VCAM-1, while NFKB2/RelA heterodimers (p49/p65) actually inhibit transcription (Shu, et al., 1993, Mol. Cell. Biol., 13, 6283-6289). Conversely, heterodimers of NFKB2/RelA (p49/p65) act with Tat-I to activate transcription of the HIV genome, while NFKB1/RelA (p50/p65) heterodimers have little effect (Liu et al., 1992, J. Virol., 66, 3883-3887). Similarly, blocking rel A gene expression with antisense oligonucleotides specifically blocks embryonic stem cell adhesion; blocking NFKB 1 gene expression with antisense oligonucleotides had no effect on cellular adhesion (Narayanan et al., 1993, Mol. Cell. Biol., 13, 3802-3810). Thus, the promiscuous role initially assigned to NFKB in transcriptional activation (Lenardo, and Baltimore, 1989, Cell, 58, 227-229) represents the sum of the activities of the rel family of DNA-binding proteins. This conclusion is supported by recent transgenic “knock-out” mice of individual members of the rel family. Such “knock-outs” show few developmental defects, suggesting that essential transcriptional activation functions can be performed by more than one member of the rel family.

[0009] A number of specific inhibitors of NFKB function in cells exist, including treatment with phosphorothioate antisense oliogonucleotide, treatment with double-stranded NFKB binding sites, and over expression of the natural inhibitor MAD-3 (an Ikappa-B family member). These agents have been used to show that NFKB is required for induction of a number of molecules involved in cancer and/or inflammation, as described below.

[0010] NFKB is required for phorbol ester-mediated induction of IL-6 (Kitajima, et al., 1992, Science, 258, 1792-5) and IL-8 (Kunsch and Rosen, 1993, Mol. Cell. Biol., 13, 6137-46).

[0011] NFKB is required for induction of the adhesion molecules ICAM-1 (Eck, et al., 1993, Mol. Cell. Biol., 13, 6530-6536), VCAM-1 (Shu et al., supra), and E-selectin (Read, et al., 1994, J. Exp. Med., 179, 503-512) on endothelial cells.

[0012] NFKB is involved in the induction of the integrin subunit, CD18, and other adhesive properties of leukocytes (Eck et al., 1993 supra).

[0013] HER2/Neu overexpression induces NFKB via a PI3-kinase/Akt pathway involving calpain-mediated degradation of IKB-alpha. Breast cancer has been shown to typify the aberrant expression of NFKB/REL factors (Pianetti et al., 2001, Oncogene, 20, 1287-1299; Sovak et al., 1999, J. Clin. Invest., 100, 2952-2960).

[0014] Inhibition of NFKB activity has been shown to induce apoptosis in murine hepatocytes (Bellas et al., 1997, Am. J. Pathol., 151, 891-896).

[0015] NFKB has been shown to regulate cyclooxygenase-2 expression and cell proliferation in human gastric cancer cells (Joo Weon et al., 2001, Laboratory Investigation, 81, 349-360).

[0016] The above studies suggest that NFKB is integrally involved in the induction of cytokines and adhesion molecules by inflammatory mediators and is involved in the transformation of cancerous cells. Two reported studies point to another connection between NFKB and inflammation: glucocorticoids may exert their anti-inflammatory effects by inhibiting NFKB. The glucocorticoid receptor and p65 both act at NFKB binding sites in the ICAM-1 promoter (van de Stolpe, et al., 1994, J. Biol. Chem., 269, 6185-6192). Glucocorticoid receptor inhibits NFKB-mediated induction of IL-6 (Ray and Prefontaine, 1994 Proc. Natl. Acad. Sci USA, 91, 752-756). Conversely, overexpression of p65 inhibits glucocorticoid induction of the mouse mammary tumor virus promoter. Finally, protein cross-linking and co-immunoprecipitation experiments demonstrated direct physical interaction between p65 and the glucocorticoid receptor.

[0017] Stinchcomb et al., U.S. Pat. No. 5,658,780, describes ribozymes targeting NFKB. Stinchcomb et al., International PCT Publication No. WO 95/23225 describe ribozymes targeting NFKB. Sullivan et al., International PCT Publication No. WO 94/02595 describe ribozymes targeting NFKB. Handel et al., International PCT Publication No. WO 01/11023, describe a specific DNAzyme motif targeting certain sites within the Rel-A subunit of NFKB.

### SUMMARY OF THE INVENTION

[0018] The present invention features an enzymatic nucleic acid molecule which modulates expression of a sequence encoding a subunit of NFKB, for example REL-A, REL-B, REL, NFkappaB 1, or NFkappaB2, wherein the enzymatic nucleic acid molecule is for example in a an hammerhead, Inozyme, Zinzyme, G-cleaver, or Amberzyme configuration.

[0019] The present invention also features an enzymatic nucleic acid molecule which modulates expression of a sequence encoding a subunit of NFKB, for example REL-A, REL-B, REL, NFkappaB 1, or NFkappaB2, wherein the enzymatic nucleic acid molecule is a DNAzyme.

[0020] In one embodiment, the present invention features an enzymatic nucleic acid molecule comprising a sequence selected from the group consisting of SEQ ID NOs. 711-1420, 1717-2012, 2151-2656, 2994-3626, and 3770-3917.

[0021] In another embodiment, the present invention features an enzymatic nucleic acid molecule comprising at least one binding arm wherein one or more of said binding arms comprises a sequence complementary to a sequence selected from the group consisting of SEQ ID NOs. 1-710, 1421-1716, 2013-2150, 2657-2993, and 3627-3769.

[0022] The present invention also features an antisense nucleic acid molecule comprising a sequence complementary to a sequence selected from the group consisting of SEQ ID NOs. 1-710, 1421-1716, 2013-2150, 2657-2993, and 3627-3769.

[0023] In one embodiment, the nucleic acid molecule of the invention, for example an enzymatic nucleic acid molecule or antisense nucleic acid molecule is adapted to treat cancer.

[0024] In another embodiment, the enzymatic nucleic acid molecule of the invention has an endonuclease activity to cleave RNA having REL-A sequence.

[0025] In a further embodiment, the enzymatic nucleic acid molecule of the invention is in a Hammerhead, Hairpin, Inozyme, Zinzyme, G-cleaver, Amberzyme, DNAzyme, or Allozyme configuration.

[0026] In one embodiment, an Inozyme of the invention comprises a sequence complementary to a sequence selected from the group consisting of SEQ ID NOs. 1-710, 3752-3756, and 3660-3720. In another embodiment, an Inozyme of the invention comprises a sequence selected from the group consisting of SEQ ID NOs. 711-1420, 3898-3902, and 3806-3866.

[0027] In one embodiment, a Zinzyme of the invention comprises a sequence complementary to a sequence selected from the group consisting of SEQ ID NOs. 1421-1716, 3721-3746, and 3757-3761. In another embodiment, a Zinzyme of the invention comprises a sequence selected from the group consisting of SEQ ID NOs 1717-2012, 3867-3892, and 3903-3907.

[0028] In one embodiment, an Amberzyme of the invention comprises a sequence complementary to a sequence selected from the group consisting of SEQ ID NOs. 1421-1716, 2657-2993, and 3765-3769. In another embodiment, an Amberzyme of the invention comprises a sequence selected from the group consisting of SEQ ID NOs 2994-3626, and 3913-3917.

[0029] In a further embodiment, an enzymatic nucleic acid molecule of the invention comprises between 12 and 100 bases complementary to RNA sequence encoding a subunit of NFKB. In another embodiment, the enzymatic nucleic acid molecule of the invention comprises between 14 and 24 bases complementary to RNA sequence encoding a subunit of NFKB, for example REL-A, REL-B, REL, NFkappaB1, or NFkappaB2.

[0030] In one embodiment, the enzymatic nucleic acid molecule of the invention is chemically synthesized. In another embodiment, the antisense nucleic acid molecule of the invention is chemically synthesized.

[0031] In one embodiment, the enzymatic nucleic acid molecule of the invention comprises at least one 2′-sugar modification, at least one base modification, and/or at least one phosphate backbone modification. In another embodiment, the antisense nucleic acid molecule of the invention comprises at least one 2′-sugar modification, at least one base modification, and/or at least one phosphate backbone modification.

[0032] The present invention features a mammalian cell including an enzymatic nucleic acid molecule of the invention. In one embodiment, the mammalian cell of the invention is a human cell.

[0033] The present invention features a method of reducing NFKB activity in a cell, comprising contacting a cell with an enzymatic nucleic acid molecule or antisense nucleic acid molecule of the invention targeted against a subunit of NFKB, for example REL-A, REL-B, REL, NFkappaB 1, or NFkappaB2, under conditions suitable for the reduction of NFKB activity. In one embodiment, the method of the invention comprises the use of one or more drug therapies under conditions suitable for the treatment.

[0034] The present invention also features a method of treatment of a patient having a condition associated with the level of NFKB, comprising contacting cells of the patient with an enzymatic nucleic acid molecule or antisense nucleic acid molecule of the invention targeted against a subunit of NFKB, for example REL-A, REL-B, REL, NFkappaB1, or NFkappaB2, under conditions suitable for the treatment. In another embodiment, the method of the invention comprises the use of one or more drug therapies under conditions suitable for the treatment. Suitable other drug therapies contemplated by the instant invention include, for example, monoclonal antibodies, REL-A-specific inhibitors, or chemotherapy, for example paclitaxel, docetaxel, cisplatin, methotrexate, cyclophosphamide, doxorubin, fluorouracil carboplatin, edatrexate, gemcitabine, or vinorelbine.

[0035] The invention also features a method of cleaving RNA comprising a sequence of a subunit of NFKB, for example REL-A, REL-B, REL, NFkappaB1, or NFkappaB2, comprising contacting an enzymatic nucleic acid molecule of the invention with the RNA under conditions suitable for the cleavage. In one embodiment, the cleavage is carried out in the presence of a divalent cation, for example Mg2+.

[0036] In one embodiment, an enzymatic nucleic acid or antisense nucleic acid molecule of the invention comprises a cap structure, wherein the cap structure is at the 5′-end, or 3′-end, or both the 5′-end and the 3′-end. In another embodiment, the cap structure at the 5′-end, 3′-end, or both the 5′-end and the 3′-end comprises a 3′, 3′-linked or 5′,5′-linked deoxyabasic ribose derivative.

[0037] The present invention features an expression vector comprising a nucleic acid sequence encoding at least one enzymatic nucleic acid molecule of the invention, for example a hammerhead ribozyme, in a manner which allows expression of the nucleic acid molecule. In one embodiment, the invention features a mammalian cell including an expression vector of the invention, for example a human cell.

[0038] In one embodiment, an expression vector of the invention comprises a sequence for an antisense nucleic acid molecule complementary to the RNA having a sequence of a subunit of NFKB. In another embodiment, an expression vector of the invention comprises a nucleic acid sequence encoding two or more of said enzymatic nucleic acid molecules, which may be the same or different. In yet another embodiment, an expression vector of the invention comprises a sequence encoding an antisense nucleic acid molecule complementary to the RNA of a subunit of NFKB, for example REL-A, REL-B, REL, NFkappaB1, or NFkappaB2.

[0039] The present invention features a method for treatment of cancer, for example breast cancer, lung cancer, prostate cancer, colorectal cancer, brain cancer, esophageal cancer, stomach cancer, bladder cancer, pancreatic cancer, cervical cancer, head and neck cancer, ovarian cancer, melanoma, lymphoma, glioma, or multidrug resistant cancer, comprising administering to a patient an enzymatic nucleic acid molecule or antisense nucleic acid molecule of the invention under conditions suitable for the treatment. In one embodiment, a method of treatment contemplated by the instant invention comprises administering to a patient one or more other therapies in combination with the enzymatic nucleic acid or antisense nucleic acid molecule of the invention.

[0040] In one embodiment, a nucleic acid molecule of the invention comprises at least five ribose residues, at least ten 2′-O-methyl modifications, and/or a 3′- end modification, for example a 3′-3′ inverted abasic moiety. In anther embodiment, a nucleic acid molecule of the invention further comprises phosphorothioate linkages on at least three 5′ terminal nucleotides.

[0041] The present invention features a method for treatment of an inflammatory disease, for example rheumatoid arthritis, restenosis, asthma, Crohn's disease, diabetes, obesity, autoimmune disease, lupus, multiple sclerosis, transplant/graft rejection, gene therapy applications, ischemia/reperfusion injury, glomerulonephritis, sepsis, allergic airway inflammation, inflammatory bowel disease, or infection, comprising the step of administering to a patient an enzymatic nucleic acid molecule or antisense nucleic acid molecule of the invention under conditions suitable for the treatment, with or without the use of other therapies.

[0042] The present invention also features a pharmaceutical composition comprising an enzymatic nucleic acid molecule or antisense nucleic acid molecule of the invention in a pharmaceutically acceptable carrier.

[0043] The invention also features a method of administering to a cell, such as mammalian cell (e.g. human cell), where the cell may be in culture or in a mammal, such as a human, an enzymatic nucleic acid molecule or antisense molecule of the instant invention, comprising contacting the cell with the enzymatic nucleic acid molecule or antisense molecule under conditions suitable for such administration.

### DETAILED DESCRIPTION OF THE INVENTION

[0044] First the drawings will be described briefly.

### DRAWINGS

[0045] FIG. 1 shows examples of chemically stabilized ribozyme motifs. HH Rz, represents hammerhead ribozyme motif (Usman et al., 1996, Curr. Op. Struct. Bio., 1, 527); NCH Rz represents the NCH ribozyme motif (Ludwig & Sproat, International PCT Publication No. WO 98/58058); G-Cleaver, represents G-cleaver ribozyme motif (Kore et al., 1998, Nucleic Acids Research 26, 4116-4120, Eckstein et al., International PCT publication No. WO 99/16871). N or n, represent independently a nucleotide which can be same or different and have complementarity to each other; rI, represents ribo-Inosine nucleotide; arrow indicates the site of cleavage within the target. Position 4 of the HH Rz and the NCH Rz is shown as having 2′-C-allyl modification, but those skilled in the art will recognize that this position can be modified with other modifications well known in the art, so long as such modifications do not significantly inhibit the activity of the ribozyme.

[0046] FIG. 2 shows an example of the Amberzyme ribozyme motif that is chemically stabilized (see for example Beigelman et al., International PCT publication No. WO 99/55857).

[0047] FIG. 3 shows an example of the Zinzyme A ribozyme motif that is chemically stabilized (see for example Beigelman et al., Beigelman et al., International PCT publication No. WO 99/55857).

[0048] FIG. 4 shows an example of a DNAzyme motif described by Santoro et al., 1997, PNAS, 94, 4262.

[0049] The invention features novel enzymatic nucleic acid molecules and methods to modulate gene expression, for example, genes encoding NF kappa-B (NFKB) and protein subunits of NFKB, such as REL-A, REL-B, REL, NFkappaB1, or NFkappaB2. In particular, the instant invention features nucleic-acid based molecules and methods to modulate the expression of the Rel-A, REL-B, REL, NFkappaB1, or NFkappaB2 subunit of NFKB.

[0050] The invention features one or more enzymatic nucleic acid-based molecules and methods that independently or in combination modulate the expression of gene(s) encoding NFKB. In particular embodiments, the invention features nucleic acid-based molecules and methods that modulate the expression of a subunit of NFKB, for example REL-A, REL-B, REL, NFkappaB 1, or NFkappaB2gene, for example (Genbank Accession No. NM_{—}021975); REL-B gene, for example (Genbank Accession No. NM_{—}006509), REL (c-rel), for example (Genbank Accession No. NM_{—}003998), NFKB1 (p105/p50), for example (Genbank Accession No. NM_{—}003998), and NFKB2 (p100/p52/p49), for example (Genbank Accession No. NM_{—}002502).

[0051] The description below of the various aspects and embodiments is provided with reference to the exemplary NFKB subunit REL-A gene, also known as p65 or P65. However, the various aspects and embodiments are also directed to other genes which encode REL-A proteins and other subunits of NFKB, such as p49, p50, p52, p100, or p105 protein subunits (Perkins et al., 1992, Proc, Natl. Acad. Sci. USA, 89, 1529-1533; Naumann et al., 1994, EMBO J., 13, 4597-4607; Heusch et al., 1999, Oncogene, 18, 6201-6208). Those additional genes can be analyzed for target sites using the methods described for REL-A. Thus, the inhibition and the effects of such inhibition of the other genes can be performed as described herein.

[0052] In one embodiment, the invention features the use of an enzymatic nucleic acid molecule, preferably in the hammerhead, NCH, G-cleaver, amberzyme, zinzyme and/or DNAzyme motif, to down-regulate the expression of REL-A genes.

[0053] By “inhibit” or “down-regulate” it is meant that the expression of the gene, or level of RNAs or equivalent RNAs encoding one or more protein subunits, or activity of one or more protein subunits, such as REL-A subunit(s), is reduced below that observed in the absence of the nucleic acid molecules of the invention. In one embodiment, inhibition or down-regulation with enzymatic nucleic acid molecule preferably is below that level observed in the presence of an enzymatically inactive or attenuated molecule that is able to bind to the same site on the target RNA, but is unable to cleave that RNA. In another embodiment, inhibition or down-regulation with antisense oligonucleotides is preferably below that level observed in the presence of, for example, an oligonucleotide with scrambled sequence or with mismatches. In another embodiment, inhibition or down-regulation of REL-A with the nucleic acid molecule of the instant invention is greater in the presence of the nucleic acid molecule than in its absence.

[0054] By “up-regulate” is meant that the expression of the gene, or level of RNAs or equivalent RNAs encoding one or more protein subunits, or activity of one or more protein subunits, such as REL-A subunit(s), is greater than that observed in the absence of the nucleic acid molecules of the invention. For example, the expression of a gene, such as REL-A gene, can be increased in order to treat, prevent, ameliorate, or modulate a pathological condition caused or exacerbated by an absence or low level of gene expression.

[0055] By “modulate” is meant that the expression of the gene, or level of RNAs or equivalent RNAs encoding one or more protein subunits, or activity of one or more protein subunit(s) is up-regulated or down-regulated, such that the expression, level, or activity is greater than or less than that observed in the absence of the nucleic acid molecules of the invention.

[0056] By “enzymatic nucleic acid molecule” it is meant a nucleic acid molecule which has complementarity in a substrate binding region to a specified gene target, and also has an enzymatic activity which is active to specifically cleave target RNA. That is, the enzymatic nucleic acid molecule is able to intermolecularly cleave RNA and thereby inactivate a target RNA molecule. These complementary regions allow sufficient hybridization of the enzymatic nucleic acid molecule to the target RNA and thus permit cleavage. One hundred percent complementarity is preferred, but complementarity as low as 50-75% can also be useful in this invention (see for example Werner and Uhlenbeck, 1995, Nucleic Acids Research, 23, 2092-2096; Hammann et al., 1999, Antisense and Nucleic Acid Drug Dev., 9, 25-31). The nucleic acids can be modified at the base, sugar, and/or phosphate groups. The term enzymatic nucleic acid is used interchangeably with phrases such as ribozymes, catalytic RNA, enzymatic RNA, catalytic DNA, aptazyme or aptamer-binding ribozyme, regulatable ribozyme, catalytic oligonucleotides, nucleozyme, DNAzyme, RNA enzyme, endoribonuclease, endonuclease, minizyme, leadzyme, oligozyme or DNA enzyme. All of these terminologies describe nucleic acid molecules with enzymatic activity. The specific enzymatic nucleic acid molecules described in the instant application are not limiting in the invention and those skilled in the art will recognize that all that is important in an enzymatic nucleic acid molecule of this invention is that it has a specific substrate binding site which is complementary to one or more of the target nucleic acid regions, and that it have nucleotide sequences within or surrounding that substrate binding site which impart a nucleic acid cleaving and/or ligation activity to the molecule (Cech et al., U.S. Pat. No. 4,987,071; Cech et al., 1988, 260 JAMA 3030).

[0057] By “nucleic acid molecule” as used herein is meant a molecule having nucleotides. The nucleic acid can be single, double, or multiple stranded and can comprise modified or unmodified nucleotides or non-nucleotides or various mixtures and combinations thereof.

[0058] By “enzymatic portion” or “catalytic domain” is meant that portion/region of the enzymatic nucleic acid molecule essential for cleavage of a nucleic acid substrate (for example see FIGS. 1-4).

[0059] By “substrate binding arm” or “substrate binding domain” is meant that portion/region of a enzymatic nucleic acid which is able to interact, for example via complementarity (i.e., able to base-pair with), with a portion of its substrate. Preferably, such complementarity is 100%, but can be less if desired. For example, as few as 10 bases out of 14 can be base-paired (see for example Werner and Uhlenbeck, 1995, Nucleic Acids Research, 23, 2092-2096; Hammann et al., 1999, Antisense and Nucleic Acid Drug Dev., 9, 25-31). Examples of such arms are shown generally in FIGS. 1-4. That is, these arms contain sequences within a enzymatic nucleic acid which are intended to bring enzymatic nucleic acid and target RNA together through complementary base-pairing interactions. The enzymatic nucleic acid of the invention can have binding arms that are contiguous or non-contiguous and may be of varying lengths. The length of the binding arm(s) are preferably greater than or equal to three nucleotides and of sufficient length to stably interact with the target RNA; preferably 12-100 nucleotides; more preferably 14-24 nucleotides long (see for example Werner and Uhlenbeck, supra; Hammann et al., supra; Hampel et al., EP0360257; Berzal-Herranz et al., 1993, EMBO J., 12, 2567-73). If two binding arms are chosen, the design is such that the length of the binding arms are symmetrical (i.e., each of the binding arms is of the same length; e.g., five and five nucleotides, or six and six nucleotides, or seven and seven nucleotides long) or asymmetrical (i.e., the binding arms are of different length; e.g., six and three nucleotides; three and six nucleotides long; four and five nucleotides long; four and six nucleotides long; four and seven nucleotides long; and the like).

[0060] By “Inozyme” or “NCH” motif or configuration is meant, an enzymatic nucleic acid molecule comprising a motif as is generally described as NCH Rz in FIG. 1. Inozymes possess endonuclease activity to cleave RNA substrates having a cleavage triplet NCH/, where N is a nucleotide, C is cytidine and H is adenosine, uridine or cytidine, and/represents the cleavage site. H is used interchangeably with X. Inozymes can also possess endonuclease activity to cleave RNA substrates having a cleavage triplet NCN/, where N is a nucleotide, C is cytidine, and/represents the cleavage site. “I” in FIG. 1 represents an Inosine nucleotide, preferably a ribo-Inosine or xylo-Inosine nucleoside.

[0061] By “G-cleaver” motif or configuration is meant, an enzymatic nucleic acid molecule comprising a motif as is generally described as G-cleaver Rz in FIG. 1. G-cleavers possess endonuclease activity to cleave RNA substrates having a cleavage triplet NYN/, where N is a nucleotide, Y is uridine or cytidine and/represents the cleavage site. G-cleavers can be chemically modified as is generally shown in FIG. 1.

[0062] By “amberzyme” motif or configuration is meant, an enzymatic nucleic acid molecule comprising a motif as is generally described in FIG. 2. Amberzymes possess endonuclease activity to cleave RNA substrates having a cleavage triplet NG/N, where N is a nucleotide, G is guanosine, and/represents the cleavage site. Amberzymes can be chemically modified to increase nuclease stability through substitutions as are generally shown in FIG. 2. In addition, differing nucleoside and/or non-nucleoside linkers can be used to substitute the 5′-gaaa-3′ loops shown in the figure. Amberzymes represent a non-limiting example of an enzymatic nucleic acid molecule that does not require a ribonucleotide (2′-OH) group within its own nucleic acid sequence for activity.

[0063] By “zinzyme” motif or configuration is meant, an enzymatic nucleic acid molecule comprising a motif as is generally described in FIG. 3. Zinzymes possess endonuclease activity to cleave RNA substrates having a cleavage triplet including but not limited to YG/Y, where Y is uridine or cytidine, and G is guanosine and/represents the cleavage site. Zinzymes can be chemically modified to increase nuclease stability through substitutions as are generally shown in FIG. 3, including substituting 2′-O-methyl guanosine nucleotides for guanosine nucleotides. In addition, differing nucleotide and/or non-nucleotide linkers can be used to substitute the 5′-gaaa-2′ loop shown in the figure. Zinzymes represent a non-limiting example of an enzymatic nucleic acid molecule that does not require a ribonucleotide (2′-OH) group within its own nucleic acid sequence for activity.

[0064] By ‘DNAzyme’ is meant, an enzymatic nucleic acid molecule that does not require the presence of a 2′-OH group within its own nucleic acid sequence for activity. In particular embodiments the enzymatic nucleic acid molecule can have an attached linker(s) or other attached or associated groups, moieties, or chains containing one or more nucleotides with 2′-OH groups. DNAzymes can be synthesized chemically or expressed endogenously in vivo, by means of a single stranded DNA vector or equivalent thereof. An example of a DNAzyme is shown in FIG. 4 and is generally reviewed in Usman et al., U.S. Pat. No., 6,159,714; Chartrand et al., 1995, NAR 23, 4092; Breaker et al., 1995, Chem. Bio. 2, 655; Santoro et al., 1997, PNAS 94, 4262; Breaker, 1999, Nature Biotechnology, 17, 422-423; and Santoro et. al., 2000, J. Am. Chem. Soc., 122, 2433-39. Additional DNAzyme motifs can be selected for using techniques similar to those described in these references, and hence, are within the scope of the present invention.

[0065] By “sufficient length” is meant an oligonucleotide of greater than or equal to 3 nucleotides that is of a length great enough to provide the intended function under the expected condition. For example, for binding arms of enzymatic nucleic acid “sufficient length” means that the binding arm sequence is long enough to provide stable binding to a target site under the expected binding conditions. Preferably, the binding arms are not so long as to prevent useful turnover of the nucleic acid molecule.

[0066] By “stably interact” is meant interaction of the oligonucleotides with target nucleic acid (e.g., by forming hydrogen bonds with complementary nucleotides in the target under physiological conditions) that is sufficient to the intended purpose (e.g., cleavage of target RNA by an enzyme).

[0067] By “equivalent” or “related” RNA to NFKB is meant to include those naturally occurring RNA molecules having homology (partial or complete) to NFKB proteins or encoding for proteins with similar function as NFKB proteins in various organisms, including human, rodent, primate, rabbit, pig, protozoans, fungi, plants, and other microorganisms and parasites. The equivalent RNA sequence also includes in addition to the coding region, regions such as 5′-untranslated region, 3′-untranslated region, introns, intron-exon junction and the like.

[0068] By “homology” is meant the nucleotide sequence of two or more nucleic acid molecules is partially or completely identical.

[0069] By “antisense nucleic acid”, it is meant a non-enzymatic nucleic acid molecule that binds to target RNA by means of RNA-RNA or RNA-DNA or RNA-PNA (protein nucleic acid; Egholm et al., 1993 Nature 365, 566) interactions and alters the activity of the target RNA (for a review, see Stein and Cheng, 1993 Science 261, 1004 and Woolf et al., U.S. Pat. No. 5,849,902). Typically, antisense molecules are complementary to a target sequence along a single contiguous sequence of the antisense molecule. However, in certain embodiments, an antisense molecule can bind to substrate such that the substrate molecule forms a loop, and/or an antisense molecule can bind such that the antisense molecule forms a loop. Thus, the antisense molecule can be complementary to two (or even more) non-contiguous substrate sequences or two (or even more) non-contiguous sequence portions of an antisense molecule can be complementary to a target sequence or both. For a review of current antisense strategies, see Schmajuk et al., 1999, J. Biol. Chem., 274, 21783-21789, Delihas et al., 1997, Nature, 15, 751-753, Stein et al., 1997, Antisense N. A. Drug Dev., 7, 151, Crooke, 2000, Methods Enzymol., 313, 3-45; Crooke, 1998, Biotech. Genet. Eng. Rev., 15, 121-157, Crooke, 1997, Ad. Pharmacol., 40, 1-49. In addition, antisense DNA can be used to target RNA by means of DNA-RNA interactions, thereby activating RNase H, which digests the target RNA in the duplex. The antisense oligonucleotides can comprise one or more RNAse H activating region, which is capable of activating RNAse H cleavage of a target RNA. Antisense DNA can be synthesized chemically or expressed via the use of a single stranded DNA expression vector or equivalent thereof.

[0070] By “RNase H activating region” is meant a region (generally greater than or equal to 4-25 nucleotides in length, preferably from 5-11 nucleotides in length) of a nucleic acid molecule capable of binding to a target RNA to form a non-covalent complex that is recognized by cellular RNase H enzyme (see for example Arrow et al., U.S. Pat. No. 5,849,902; Arrow et al., U.S. Pat. No. 5,989,912). The RNase H enzyme binds to the nucleic acid molecule-target RNA complex and cleaves the target RNA sequence. The RNase H activating region comprises, for example, phosphodiester, phosphorothioate (preferably at least four of the nucleotides are phosphorothiote substitutions; more specifically, 4-11 of the nucleotides are phosphorothiote substitutions); phosphorodithioate, 5′-thiophosphate, or methylphosphonate backbone chemistry or a combination thereof. In addition to one or more backbone chemistries described above, the RNase H activating region can also comprise a variety of sugar chemistries. For example, the RNase H activating region can comprise deoxyribose, arabino, fluoroarabino or a combination thereof, nucleotide sugar chemistry. Those skilled in the art will recognize that the foregoing are non-limiting examples and that any combination of phosphate, sugar and base chemistry of a nucleic acid that supports the activity of RNase H enzyme is within the scope of the definition of the RNase H activating region and the instant invention.

[0071] By “gene” it is meant a nucleic acid that encodes an RNA, for example, nucleic acid sequences including but not limited to structural genes encoding a polypeptide.

[0072] “Complementarity” refers to the ability of a nucleic acid to form hydrogen bond(s) with another RNA sequence by either traditional Watson-Crick or other non-traditional types. In reference to the nucleic molecules of the present invention, the binding free energy for a nucleic acid molecule with its target or complementary sequence is sufficient to allow the relevant function of the nucleic acid to proceed, e.g., enzymatic nucleic acid cleavage, antisense or triple helix inhibition. Determination of binding free energies for nucleic acid molecules is well known in the art (see, e.g., Turner et al., 1987, CSH Symp. Quant. Biol. LII pp.123-133; Frier et al., 1986, Proc. Nat. Acad. Sci. USA 83:9373-9377; Turner et al., 1987, J. Am. Chem. Soc. 109:3783-3785). A percent complementarity indicates the percentage of contiguous residues in a nucleic acid molecule which can form hydrogen bonds (e.g., Watson-Crick base pairing) with a second nucleic acid sequence (e.g., 5, 6, 7, 8, 9, 10 out of 10 being 50%, 60%, 70%, 80%, 90% and 100% complementary). “Perfectly complementary” means that all the contiguous residues of a nucleic acid sequence will hydrogen bond with the same number of contiguous residues in a second nucleic acid sequence.

[0073] By “RNA” is meant a molecule comprising at least one ribonucleotide residue. By “ribonucleotide” or “2′-OH” is meant a nucleotide with a hydroxyl group at the 2′position of a β-D-ribo-furanose moiety.

[0074] By “decoy RNA” is meant an RNA molecule or aptamer that is designed to preferentially bind to a predetermined ligand. Such binding can result in the inhibition or activation of a target molecule. The decoy RNA or aptamer can compete with a naturally occurring binding target for the binding of a specific ligand. For example, it has been shown that over-expression of HIV trans-activation response (TAR) RNA can act as a “decoy” and efficiently binds HIV tat protein, thereby preventing it from binding to TAR sequences encoded in the HIV RNA (Sullenger et al., 1990, Cell, 63, 601-608). This is but a specific example and those in the art will recognize that other embodiments can be readily generated using techniques generally known in the art, see for example Gold et al., 1995, Annu. Rev. Biochem., 64, 763; Brody and Gold, 2000, J. Biotechnol., 74, 5; Sun, 2000, Curr. Opin. Mol. Ther., 2, 100; Kusser, 2000, J. Biotechnol., 74, 27; Hermann and Patel, 2000, Science, 287, 820; and Jayasena, 1999, Clinical Chemistry, 45, 1628. Similarly, a decoy RNA can be designed to bind to REL-A and block the binding of REL-A or a decoy RNA can be designed to bind to REL-A and prevent interaction with the REL-A protein.

[0075] Several varieties of enzymatic RNAs are known presently. Each can catalyze the hydrolysis of RNA phosphodiester bonds in trans (and thus can cleave other RNA molecules) under physiological conditions. Table I summarizes some of the characteristics of these ribozymes. In general, enzymatic nucleic acids act by first binding to a target RNA. Such binding occurs through the target binding portion of a enzymatic nucleic acid which is held in close proximity to an enzymatic portion of the molecule that acts to cleave the target RNA. Thus, the enzymatic nucleic acid first recognizes and then binds a target RNA through complementary base-pairing, and once bound to the correct site, acts enzymatically to cut the target RNA. Strategic cleavage of such a target RNA will destroy its ability to direct synthesis of an encoded protein. After an enzymatic nucleic acid has bound and cleaved its RNA target, it is released from that RNA to search for another target and can repeatedly bind and cleave new targets. Thus, a single ribozyme molecule is able to cleave many molecules of target RNA. In addition, the ribozyme is a highly specific inhibitor of gene expression, with the specificity of inhibition depending not only on the base-pairing mechanism of binding to the target RNA, but also on the mechanism of target RNA cleavage. Single mismatches, or base-substitutions, near the site of cleavage can completely eliminate catalytic activity of a ribozyme.

[0076] The enzymatic nucleic acid molecule that cleave the specified sites in NFKB-specific RNAs represent a therapeutic approach to treat a variety of inflammatory diseases and conditions, including but not limited to rheumatoid arthritis, restenosis, asthma, Crohn's disease, diabetes, obesity, autoimmune disease, lupus, multiple sclerosis, transplant/graft rejection, gene therapy applications, ischemia/reperfusion injury (CNS and myocardial), glomerulonephritis, sepsis, allergic airway inflammation, inflammatory bowel disease, infection, and any other inflammatory disease or condition which respond to the modulation of REL-A NFKB function.

[0077] The enzymatic nucleic acid molecule that cleave the specified sites in NFKB-specific RNAs also represent a therapeutic approach to treat a variety of cancers, including but not limited to breast, lung, prostate, colorectal, brain, esophageal, bladder, pancreatic, cervical, head and neck, and ovarian cancer, melanoma, lymphoma, glioma, multidrug resistant cancers, and/or other cancers which respond to the modulation of NFKB function.

[0078] In one embodiment of the inventions described herein, the enzymatic nucleic acid molecule is formed in a hammerhead or hairpin motif, but can also be formed in the motif of a hepatitis delta virus, group I intron, group II intron or RNase P RNA (in association with an RNA guide sequence), Neurospora VS RNA, DNAzymes, NCH cleaving motifs, or G-cleavers. Examples of such hammerhead motifs are described by Dreyfus, supra, Rossi et al., 1992, AIDS Research and Human Retroviruses 8, 183; of hairpin motifs by Hampel et al., EP0360257, Hampel and Tritz, 1989 Biochemistry 28, 4929, Feldstein et al., 1989, Gene 82, 53, Haseloff and Gerlach, 1989, Gene, 82, 43, and Hampel et al., 1990 Nucleic Acids Res. 18, 299; Chowrira & McSwiggen, U.S. Pat. No. 5,631,359; of the hepatitis delta virus motif is described by Perrotta and Been, 1992 Biochemistry 31, 16; of the RNase P motif by Guerrier-Takada et al., 1983 Cell 35, 849; Forster and Altman, 1990, Science 249, 783; Li and Altman, 1996, Nucleic Acids Res. 24, 835; Neurospora VS RNA ribozyme motif is described by Collins (Saville and Collins, 1990 Cell 61, 685-696; Saville and Collins, 1991 Proc. Natl. Acad. Sci. USA 88, 8826-8830; Collins and Olive, 1993 Biochemistry 32, 2795-2799; Guo and Collins, 1995, EMBO. J. 14, 363); Group II introns are described by Griffin et al., 1995, Chem. Biol. 2, 761; Michels and Pyle, 1995, Biochemistry 34, 2965; Pyle et al., International PCT Publication No. WO 96/22689; of the Group I intron by Cech et al., U.S. Pat. No. 4,987,071 and of DNAzymes by Usman et al., International PCT Publication No. WO 95/11304; Chartrand et al., 1995, NAR 23, 4092; Breaker et al., 1995, Chem. Bio. 2, 655; Santoro et al., 1997, PNAS 94, 4262, and Beigelman et al., International PCT publication No. WO 99/55857. NCH cleaving motifs are described in Ludwig & Sproat, International PCT Publication No. WO 98/58058; and G-cleavers are described in Kore et al., 1998, Nucleic Acids Research 26, 4116-4120 and Eckstein et al., International PCT Publication No. WO 99/16871. Additional motifs such as the Aptazyme (Breaker et al., WO 98/43993), Amberzyme (Class I motif; FIG. 2; Beigelman et al., U.S. Ser. No. 09/301,511) and Zinzyme (FIG. 3) (Beigelman et al., U.S. Ser. No. 09/301,511), all included by reference herein including drawings, can also be used in the present invention. These specific motifs or configurations are not limiting in the invention and those skilled in the art will recognize that all that is important in an enzymatic nucleic acid molecule of this invention is that it has a specific substrate binding site which is complementary to one or more of the target gene RNA regions, and that it have nucleotide sequences within or surrounding that substrate binding site which impart an RNA cleaving activity to the molecule (Cech et al., U.S. Pat. No. 4,987,071).

[0079] In one embodiment of the present invention, a nucleic acid molecule of the instant invention can be between about 10 and 100 nucleotides in length. Exemplary enzymatic nucleic acid molecules of the invention are shown in Tables III to VII. For example, enzymatic nucleic acid molecules of the invention are preferably between about 15 and 50 nucleotides in length, more preferably between about 25 and 40 nucleotides in length, e.g., 34, 36, or 38 nucleotides in length (for example see Jarvis et al., 1996, J. Biol. Chem., 271, 29107-29112). Exemplary DNAzymes of the invention are preferably between about 15 and 40 nucleotides in length, more preferably between about 25 and 35 nucleotides in length, e.g., 29, 30, 31, or 32 nucleotides in length (see for example Santoro et al., 1998, Biochemistry, 37, 13330-13342; Chartrand et al., 1995, Nucleic Acids Research, 23, 4092-4096). Exemplary antisense molecules of the invention are preferably between about 15 and 75 nucleotides in length, more preferably between about 20 and 35 nucleotides in length, e.g., 25, 26, 27, or 28 nucleotides in length (see for example Woolf et al., 1992, PNAS., 89, 7305-7309; Milner et al., 1997, Nature Biotechnology, 15, 537-541). Exemplary triplex forming oligonucleotide molecules of the invention are preferably between about 10 and 40 nucleotides in length, more preferably between about 12 and 25 nucleotides in length, e.g., 18, 19, 20, or 21 nucleotides in length (see for example Maher et al., 1990, Biochemistry, 29, 8820-8826; Strobel and Dervan, 1990, Science, 249, 73-75). Those skilled in the art will recognize that all that is required is that the nucleic acid molecule be of sufficient length and suitable conformation for the nucleic acid molecule to interact with its target and/or catalyze a reaction contemplated herein. The length of the nucleic acid molecules of the instant invention are not limiting within the general limits stated.

[0080] Preferably, a nucleic acid molecule that modulates, for example, down-regulates REL-A expression comprises between 12 and 100 bases complementary to a RNA molecule of REL-A. Even more preferably, a nucleic acid molecule that modulates, for example REL-A expression comprises between 14 and 24 bases complementary to a RNA molecule of REL-A.

[0081] The invention provides a method for producing a class of nucleic acid-based gene modulating agents which exhibit a high degree of specificity for the RNA of a desired target. For example, the enzymatic nucleic acid molecule is preferably targeted to a highly conserved sequence region of target RNAs encoding REL-A (specifically REL-A genes) such that specific treatment of a disease or condition can be provided with either one or several nucleic acid molecules of the invention. Such nucleic acid molecules can be delivered exogenously to specific tissue or cellular targets as required. Alternatively, the nucleic acid molecules (e.g., ribozymes and antisense) can be expressed from DNA and/or RNA vectors that are delivered to specific cells.

[0082] As used in herein “cell” is used in its usual biological sense, and does not refer to an entire multicellular organism. The cell can, for example, be in vitro, e.g., in cell culture, or present in a multicellular organism, including, e.g., birds, plants and mammals such as humans, cows, sheep, apes, monkeys, swine, dogs, and cats. The cell may be prokaryotic (e.g., bacterial cell) or eukaryotic (e.g., mammalian or plant cell).

[0083] By “REL-A proteins” is meant, a peptide or protein comprising a REL-A or p65 subunit of NFKB, for example a subunit involved in transcriptional activation activity.

[0084] By “highly conserved sequence region” is meant, a nucleotide sequence of one or more regions in a target gene does not vary significantly from one generation to the other or from one biological system to the other.

[0085] Nucleic acid-based inhibitors of NFKB function are useful for the prevention and/or treatment of cancers and cancerous conditions such as breast, lung, prostate, colorectal, brain, esophageal, bladder, pancreatic, cervical, head and neck, and ovarian cancer, melanoma, lymphoma, glioma, multidrug resistant cancers, and any other diseases or conditions that are related to or will respond to the levels of NFKB in a cell or tissue, alone or in combination with other therapies.

[0086] Nucleic acid-based inhibitors of NFKB function are also useful for the prevention and/or treatment of inflammatory diseases and conditions, including but not limited to rheumatoid arthritis, restenosis, asthma, Crohn's disease, diabetes, obesity, autoimmune disease, lupus, multiple sclerosis, transplant/graft rejection, gene therapy applications, ischemia/reperfusion injury (CNS and myocardial), glomerulonephritis, sepsis, allergic airway inflammation, inflammatory bowel disease, infection, and any other inflammatory disease or condition which respond to the modulation of NFKB function.

[0087] The nucleic acid-based inhibitors of the invention are added directly, or can be complexed with cationic lipids, packaged within liposomes, or otherwise delivered to target cells or tissues. The nucleic acid or nucleic acid complexes can be locally administered to relevant tissues ex vivo, or in vivo through injection or infusion pump, with or without their incorporation in biopolymers. In preferred embodiments, the enzymatic nucleic acid inhibitors comprise sequences, which are complementary to the substrate sequences in Tables III to VII. Examples of such enzymatic nucleic acid molecules also are shown in Tables III to VII. Examples of such enzymatic nucleic acid molecules consist essentially of sequences defined in these tables.

[0088] In another embodiment, the invention features antisense nucleic acid molecules and 2-5A chimera including sequences complementary to the substrate sequences shown in Tables III to VII. Such nucleic acid molecules can include sequences as shown for the binding arms of the enzymatic nucleic acid molecules in Tables III to VII. Similarly, triplex molecules can be provided targeted to the corresponding DNA target regions, and containing the DNA equivalent of a target sequence or a sequence complementary to the specified target (substrate) sequence. Typically, antisense molecules are complementary to a target sequence along a single contiguous sequence of the antisense molecule. However, in certain embodiments, an antisense molecule can bind to substrate such that the substrate molecule forms a loop, and/or an antisense molecule can bind such that the antisense molecule forms a loop. Thus, the antisense molecule can be complementary to two (or even more) non-contiguous substrate sequences or two (or even more) non-contiguous sequence portions of an antisense molecule can be complementary to a target sequence or both.

[0089] By “consists essentially of” is meant that the active nucleic acid molecule of the invention, for example, an enzymatic nucleic acid molecule, contains an enzymatic center or core equivalent to those in the examples, and binding arms able to bind RNA such that cleavage at the target site occurs. Other sequences can be present which do not interfere with such cleavage. Thus, a core region can, for example, include one or more loop, stem-loop structure, or linker which does not prevent enzymatic activity. Thus, the underlined regions in the sequences in Table III can be such a loop, stem-loop, nucleotide linker, and/or non-nucleotide linker and can be represented generally as sequence “X”. For example, a core sequence for a hammerhead enzymatic nucleic acid can comprise a conserved sequence, such as 5′-CUGAUGAG-3′ and 5′-CGAA-3′ connected by “X”, where X is 5′-GCCGUUAGGC-3′ (SEQ ID NO 3929), or any other Stem II region known in the art, or a nucleotide and/or non-nucleotide linker. Similarly, for other nucleic acid molecules of the instant invention, such as Inozyme, G-cleaver, amberzyme, zinzyme, DNAzyme, antisense, 2-5A antisense, triplex forming nucleic acid, and decoy nucleic acids, other sequences or non-nucleotide linkers can be present that do not interfere with the function of the nucleic acid molecule.

[0090] Sequence X can be a linker of >2 nucleotides in length, preferably 3, 4, 5, 6, 7, 8, 9, 10, 15, 20, 26, 30, where the nucleotides can preferably be internally base-paired to form a stem of preferably≧2 base pairs. In yet another embodiment, the nucleotide linker X can be a nucleic acid aptamer, such as an ATP aptamer, HIV Rev aptamer (RRE), HIV Tat aptamer (TAR) and others (for a review see Gold et al., 1995, Annu. Rev. Biochem., 64, 763; and Szostak & Ellington, 1993, in The RNA World, ed. Gesteland and Atkins, pp. 511, CSH Laboratory Press). A “nucleic acid aptamer” as used herein is meant to indicate a nucleic acid sequence capable of interacting with a ligand. The ligand can be any natural or a synthetic molecule, including but not limited to a resin, metabolites, nucleosides, nucleotides, drugs, toxins, transition state analogs, peptides, lipids, proteins, amino acids, nucleic acid molecules, hormones, carbohydrates, receptors, cells, viruses, bacteria and others.

[0091] In yet another embodiment, alternatively or in addition, sequence X can be a non-nucleotide linker. Non-nucleotides as can include abasic nucleotide, polyether, polyamine, polyamide, peptide, carbohydrate, lipid, or polyhydrocarbon compounds. Specific examples include those described by Seela and Kaiser, Nucleic Acids Res. 1990, 18:6353 and Nucleic Acids Res. 1987, 15:3113; Cload and Schepartz, J. Am. Chem. Soc. 1991, 113:6324; Richardson and Schepartz, J. Am. Chem. Soc. 1991, 113:5109; Ma et al., Nucleic Acids Res. 1993, 21:2585 and Biochemistry 1993, 32:1751; Durand et al., Nucleic Acids Res. 1990, 18:6353; McCurdy et al., Nucleosides & Nucleotides 1991, 10:287; Jschke et al., Tetrahedron Lett. 1993, 34:301; Ono et al., Biochemistry 1991, 30:9914; Arnold et al., International Publication No. WO 89/02439; Usman et al., International Publication No. WO 95/06731; Dudycz et al., International Publication No. WO 95/11910 and Ferentz and Verdine, J. Am. Chem. Soc. 1991, 113:4000, all hereby incorporated by reference herein. A “non-nucleotide” further means any group or compound which can be incorporated into a nucleic acid chain in the place of one or more nucleotide units, including either sugar and/or phosphate substitutions, and allows the remaining bases to exhibit their enzymatic activity. The group or compound can be abasic in that it does not contain a commonly recognized nucleotide base, such as adenosine, guanine, cytosine, uracil or thymine. Thus, in a preferred embodiment, the invention features an enzymatic nucleic acid molecule having one or more non-nucleotide moieties, and having enzymatic activity to cleave an RNA or DNA molecule.

[0092] In another aspect of the invention, enzymatic nucleic acid molecules or antisense molecules that interact with target RNA molecules and down-regulate REL-A (specifically REL-A gene) activity are expressed from transcription units inserted into DNA or RNA vectors. The recombinant vectors are preferably DNA plasmids or viral vectors. Enzymatic nucleic acid molecule or antisense expressing viral vectors can be constructed based on, but not limited to, adeno-associated virus, retrovirus, adenovirus, or alphavirus. Preferably, the recombinant vectors capable of expressing the enzymatic nucleic acid molecules or antisense are delivered as described above, and persist in target cells. Alternatively, viral vectors can be used that provide for transient expression of enzymatic nucleic acid molecules or antisense. Such vectors can be repeatedly administered as necessary. Once expressed, the enzymatic nucleic acid molecules or antisense bind to the target RNA and down-regulate its function or expression. Delivery of enzymatic nucleic acid molecule or antisense expressing vectors can be systemic, such as by intravenous or intramuscular administration, by administration to target cells ex-planted from the patient followed by reintroduction into the patient, or by any other means that would allow for introduction into the desired target cell. Antisense DNA can be expressed via the use of a single stranded DNA intracellular expression vector.

[0093] By “vectors” is meant any nucleic acid- and/or viral-based technique used to deliver a desired nucleic acid.

[0094] By “patient” is meant an organism, which is a donor or recipient of explanted cells or the cells themselves. “Patient” also refers to an organism to which the nucleic acid molecules of the invention can be administered. Preferably, a patient is a mammal or mammalian cells. More preferably, a patient is a human or human cells.

[0095] By “enhanced enzymatic activity” is meant to include activity measured in cells and/or in vivo where the activity is a reflection of both the catalytic activity and the stability of the nucleic 30 acid molecules of the invention. In this invention, the product of these properties can be increased in vivo compared to an all RNA enzymatic nucleic acid or all DNA enzyme. In some cases, the activity or stability of the nucleic acid molecule can be decreased (i.e., less than ten- fold), but the overall activity of the nucleic acid molecule is enhanced, in vivo.

[0096] The nucleic acid molecules of the instant invention, individually, or in combination or in conjunction with other drugs, can be used to treat diseases or conditions discussed above. For example, to treat a disease or condition associated with the levels of REL-A, the patient can be treated, or other appropriate cells can be treated, as is evident to those skilled in the art, individually or in combination with one or more drugs under conditions suitable for the treatment.

[0097] In a further embodiment, the described molecules, such as antisense or ribozymes, can be used in combination with other known treatments to treat conditions or diseases discussed above. For example, the described molecules can be used in combination with one or more known therapeutic agents to treat breast, lung, prostate, colorectal, brain, esophageal, bladder, pancreatic, cervical, head and neck, and ovarian cancer, melanoma, lymphoma, glioma, multidrug resistant cancers, rheumatoid arthritis, restenosis, asthma, Crohn's disease, diabetes, obesity, autoimmune disease, lupus, multiple sclerosis, transplant/graft rejection, gene therapy applications, ischemia/reperfusion injury (CNS and myocardial), glomerulonephritis, sepsis, allergic airway inflammation, inflammatory bowel disease, infection, and any other cancerous disease or inflammatory disease or condition which respond to the modulation of REL-A expression.

[0098] In another embodiment, the invention features nucleic acid-based inhibitors (e.g., enzymatic nucleic acid molecules (eg; ribozymes), antisense nucleic acids, 2-5A antisense chimeras, triplex DNA, antisense nucleic acids containing RNA cleaving chemical groups) and methods for their use to down regulate or inhibit the expression of genes (e.g., REL-A) capable of progression and/or maintenance of cancer, inflammatory diseases, and/or other disease states which respond to the modulation of REL-A expression.

[0099] By “comprising” is meant including, but not limited to, whatever follows the word “comprising”. Thus, use of the term “comprising” indicates that the listed elements are required or mandatory, but that other elements are optional and may or may not be present. By “consisting of” is meant including, and limited to, whatever follows the phrase “consisting of”. Thus, the phrase “consisting of⇄ indicates that the listed elements are required or mandatory, and that no other elements may be present.

[0100] Other features and advantages of the invention will be apparent from the following description of the preferred embodiments thereof, and from the claims.

[0101] Mechanism of Action of Nucleic Acid Molecules of the Invention as Proposed in the Art

[0102] Antisense: Antisense molecules can be modified or unmodified RNA, DNA, or mixed polymer oligonucleotides and primarily function by specifically binding to matching sequences resulting in inhibition of peptide synthesis (Wu-Pong, Nov. 1994, BioPharm, 20-33). The antisense oligonucleotide binds to target RNA by Watson Crick base-pairing and blocks gene expression by preventing ribosomal translation of the bound sequences either by steric blocking or by activating RNase H enzyme. Antisense molecules can also alter protein synthesis by interfering with RNA processing or transport from the nucleus into the cytoplasm (Mukhopadhyay & Roth, 1996, Crit. Rev. in Oncogenesis 7, 151-190).

[0103] In addition, binding of single stranded DNA to RNA can result in nuclease degradation of the heteroduplex (Wu-Pong, supra; Crooke, supra). To date, the only backbone modified DNA chemistry which act as substrates for RNase H are phosphorothioates, phosphorodithioates, and borontrifluoridates. Recently it has been reported that 2′-arabino and 2′-fluoro arabino-containing oligos can also activate RNase H activity.

[0104] A number of antisense molecules have been described that utilize novel configurations of chemically modified nucleotides, secondary structure, and/or RNase H substrate domains (Woolf et al., International PCT Publication No. WO 98/13526; Thompson et al., International PCT Publication No. WO 99/54459; Hartmann et al., U.S. Ser. No. 60/101,174 which was filed on Sep. 21, 1998) all of these are incorporated by reference herein in their entirety.

[0105] In addition, antisense deoxyoligoribonucleotides can be used to target RNA by means of DNA-RNA interactions, thereby activating RNase H, which digests the target RNA in the duplex. Antisense DNA can be expressed via the use of a single stranded DNA intracellular expression vector or equivalents and variations thereof.

[0106] Enzymatic Nucleic Acid: Several varieties of enzymatic RNAs are presently known. In addition, several in vitro selection (evolution) strategies (Orgel, 1979, Proc. R. Soc. London, B 205, 435) have been used to evolve new nucleic acid catalysts capable of catalyzing cleavage and ligation of phosphodiester linkages (Joyce, 1989, Gene, 82, 83-87; Beaudry et al., 1992, Science 257, 635-641; Joyce, 1992, Scientific American 267, 90-97; Breaker et al., 1994, TIBTECH 12, 268; Bartel et al., 1993, Science 261:1411-1418; Szostak, 1993, TIBS 17, 89-93; Kumar et al., 1995, FASEB J., 9, 1183; Breaker, 1996, Curr. Op. Biotech., 7, 442; Santoro et al., 1997, Proc. Natl. Acad. Sci., 94, 4262; Tang et al., 1997, RNA 3, 914; Nakamaye & Eckstein, 1994, supra; Long & Uhlenbeck, 1994, supra; Ishizaka et al., 1995, supra; Vaish et al., 1997, Biochemistry 36, 6495; all of these are incorporated by reference herein). Each can catalyze a series of reactions including the hydrolysis of phosphodiester bonds in trans (and thus can cleave other RNA molecules) under physiological conditions.

[0107] Nucleic acid molecules of this invention will block to some extent REL-A and/or NFKB protein expression and can be used to treat disease or diagnose disease associated with the levels of REL-A and/or NFKB. Enzymatic nucleic acid sequences targeting REL-A RNA and sequences that can be targeted with nucleic acid molecules of the invention to down-regulate REL-A expression are shown in Tables III to VII.

[0108] The enzymatic nature of an enzymatic nucleic acid molecule can allow the concentration of enzymatic nucleic acid molecule necessary to affect a therapeutic treatment to be lower. This reflects the ability of the enzymatic nucleic acid molecule to act enzymatically. Thus, a single enzymatic nucleic acid molecule is able to cleave many molecules of target RNA. In addition, the enzymatic nucleic acid molecule is a highly specific inhibitor, with the specificity of inhibition depending not only on the base-pairing mechanism of binding to the target RNA, but also on the mechanism of target RNA cleavage. Single mismatches, or base-substitutions, near the site of cleavage can be chosen to greatly attenuate the catalytic activity of a enzymatic nucleic acid molecule.

[0109] Nucleic acid molecules having an endonuclease enzymatic activity are able to repeatedly cleave other separate RNA molecules in a nucleotide base sequence-specific manner. Such enzymatic nucleic acid molecules can be targeted to virtually any RNA transcript, and achieve efficient cleavage in vitro (Zaug et al., 324, Nature 429 1986; Uhlenbeck, 1987 Nature 328, 596; Kim et al., 84 Proc. Natl. Acad. Sci. USA 8788, 1987; Dreyfus, 1988, Einstein Quart. J. Bio. Med., 6, 92; Haseloff and Gerlach, 334 Nature 585, 1988; Cech, 260 JAMA 3030, 1988; and Jefferies et al., 17 Nucleic Acids Research 1371, 1989; Santoro et al., 1997 supra).

[0110] Because of their sequence specificity, trans-cleaving enzymatic nucleic acid molecules can be used as therapeutic agents for human disease (Usman & McSwiggen, 1995 Ann. Rep. Med. Chem. 30, 285-294; Christoffersen and Marr, 1995 J. Med. Chem. 38, 2023-2037). Enzymatic nucleic acid molecules can be designed to cleave specific RNA targets within the background of cellular RNA. Such a cleavage event renders the RNA non-functional and abrogates protein expression from that RNA. In this manner, synthesis of a protein associated with a disease state can be selectively inhibited (Warashina et al., 1999, Chemistry and Biology., 6, 237-250).

[0111] Enzymatic nucleic acid molecules of the invention that are allosterically regulated (“allozymes”) can be used to modulate NFKB expression. These allosteric enzymatic nucleic acids or allozymes (see for example George et al., U.S. Pat. Nos. 5,834,186 and 5,741,679, Shih et al., U.S. Pat. No. 5,589,332, Nathan et al., U.S. Pat. No 5,871,914, Nathan and Ellington, International PCT publication No. WO 00/24931, Breaker et al., International PCT Publication Nos. WO 00/26226 and 98/27104, and Sullenger et al., International PCT publication No. WO 99/29842) are designed to respond to a signaling agent, for example, mutant REL-A protein, wild-type REL-A protein, mutant REL-A RNA, wild-type REL-A RNA, other proteins and/or RNAs involved in NFKB activity, compounds, metals, polymers, molecules and/or drugs that are targeted to NFKB or NFKB subunit, such as REL-A, expressing cells etc., which in turn modulates the activity of the enzymatic nucleic acid molecule. In response to interaction with a predetermined signaling agent, the allosteric enzymatic nucleic acid molecule's activity is activated or inhibited such that the expression of a particular target is selectively down-regulated. The target can comprise wild-type REL-A, mutant REL-A, a component of NFKB, and/or a predetermined cellular component that modulates REL-A/NFKB activity. In a specific example, allosteric enzymatic nucleic acid molecules that are activated by interaction with a RNA encoding a mutant REL-A protein are used as therapeutic agents in vivo. The presence of RNA encoding the mutant REL-A protein activates the allosteric enzymatic nucleic acid molecule that subsequently cleaves the RNA encoding a mutant REL-A protein resulting in the inhibition of mutant REL-A protein expression. In this manner, cells that express the mutant form of the REL-A protein are selectively targeted.

[0112] In another non-limiting example, an allozyme can be activated by a REL-A protein, peptide, or mutant polypeptide that caused the allozyme to inhibit the expression of REL-A gene, by, for example, cleaving RNA encoded by REL-A gene. In this non-limiting example, the allozyme acts as a decoy to inhibit the function of REL-A and also inhibit the expression of REL-A once activated by the REL-A protein.

[0113] The nucleic acid molecules of the instant invention are also referred to as GeneBloc reagents, which are essentially nucleic acid molecules (eg; ribozymes, antisense) capable of down-regulating gene expression.

[0114] Target Sites

[0115] Targets for useful enzymatic nucleic acid molecules and antisense nucleic acids can be determined as disclosed in Draper et al., WO 93/23569; Sullivan et al., WO 93/23057; Thompson et al., WO 94/02595; Draper et al., WO 95/04818; McSwiggen et al., U.S. Pat. No. 5,525,468, and hereby incorporated by reference herein in totality. Other examples include the following PCT applications, which concern inactivation of expression of disease-related genes: WO 95/23225, WO 95/13380, WO 94/02595, incorporated by reference herein. Rather than repeat the guidance provided in those documents here, below are provided specific examples of such methods, not limiting to those in the art. Enzymatic nucleic acid molecules and antisense to such targets are designed as described in those applications and synthesized to be tested in vitro and in vivo, as also described. The sequences of human REL-A RNAs were screened for optimal enzymatic nucleic acid and antisense target sites using a computer-folding algorithm. Antisense, hammerhead, DNAzyme, NCH, amberzyme, zinzyme, or G-Cleaver enzymatic nucleic acid molecule binding/cleavage sites were identified. These sites are shown in Tables III to VII (all sequences are 5′ to 3′ in the tables; underlined regions can be any sequence “X” or linker X, the actual sequence is not relevant here). The nucleotide base position is noted in the Tables as that site to be cleaved by the designated type of enzymatic nucleic acid molecule. While human sequences can be screened and enzymatic nucleic acid molecule and/or antisense thereafter designed, as discussed in Stinchcomb et al., WO 95/23225, mouse targeted enzymatic nucleic acid molecules can be useful to test efficacy of action of the enzymatic nucleic acid molecule and/or antisense prior to testing in humans.

[0116] Antisense, hammerhead, DNAzyme, NCH, amberzyme, zinzyme or G-Cleaver enzymatic nucleic acid molecule binding/cleavage sites were identified. The nucleic acid molecules are individually analyzed by computer folding (Jaeger et al., 1989 Proc. Natl. Acad. Sci. USA, 86, 7706) to assess whether the sequences fold into the appropriate secondary structure. Those nucleic acid molecules with unfavorable intramolecular interactions such as between the binding arms and the catalytic core are eliminated from consideration. Varying binding arm lengths can be chosen to optimize activity.

[0117] Antisense, hammerhead, DNAzyme, NCH, amberzyme, zinzyme or G-Cleaver enzymatic nucleic acid molecule binding/cleavage sites were identified and were designed to anneal to various sites in the RNA target. The binding arms are complementary to the target site sequences described above. The nucleic acid molecules were chemically synthesized. The method of synthesis used follows the procedure for normal DNA/RNA synthesis as described below and in Usman et al., 1987 J. Am. Chem. Soc., 109, 7845; Scaringe et al., 1990 Nucleic Acids Res., 18, 5433; and Wincott et al., 1995 Nucleic Acids Res. 23, 2677-2684; Caruthers et al., 1992, Methods in Enzymology 211,3-19.

[0118] Synthesis of Nucleic Acid Molecules

[0119] Synthesis of nucleic acids greater than 100 nucleotides in length can be difficult using automated methods, and the therapeutic cost of such molecules can be prohibitive. In this invention, small nucleic acid motifs (” small refers to nucleic acid motifs less than about 100 nucleotides in length, preferably less than about 80 nucleotides in length, and more preferably less than about 50 nucleotides in length; e.g., antisense oligonucleotides, hammerhead or the NCH ribozymes) are preferably used for exogenous delivery. The simple structure of these molecules increases the ability of the nucleic acid to invade targeted regions of RNA structure. Exemplary molecules of the instant invention are chemically synthesized, and others can similarly be synthesized.

[0120] Oligonucleotides (eg; antisense, GeneBlocs) are synthesized using protocols known in the art as described in Caruthers et al., 1992, Methods in Enzymology 211, 3-19, Thompson et al., International PCT Publication No. WO 99/54459, Wincott et al., 1995, Nucleic Acids Res. 23, 2677-2684, Wincott et al., 1997, Methods Mol. Bio., 74, 59, Brennan et al., 1998, Biotechnol Bioeng., 61, 33-45, and Brennan, U.S. Pat. No. 6,001,311. All of these references are incorporated herein by reference. The synthesis of oligonucleotides makes use of common nucleic acid protecting and coupling groups, such as dimethoxytrityl at the 5′-end, and phosphoramidites at the 3′-end. In a non-limiting example, small scale syntheses are conducted on a 394 Applied Biosystems, Inc. synthesizer using a 0.2 μmol scale protocol with a 2.5 min coupling step for 2′-O-methylated nucleotides and a 45 sec coupling step for 2′-deoxy nucleotides. Table II outlines the amounts and the contact times of the reagents used in the synthesis cycle. Alternatively, syntheses at the 0.2 μmol scale can be performed on a 96-well plate synthesizer, such as the instrument produced by Protogene (Palo Alto, Calif.) with minimal modification to the cycle. A 33-fold excess (60 μL of 0.11 M=6.6 μmol) of 2′-O-methyl phosphoramidite and a 105-fold excess of S-ethyl tetrazole (60 μL of 0.25 M=15 μmol) can be used in each coupling cycle of 2′-O-methyl residues relative to polymer-bound 5′-hydroxyl. A 22-fold excess (40 μL of 0.11 M=4.4 μmol) of deoxy phosphoramidite and a 70-fold excess of S-ethyl tetrazole (40 μL of 0.25 M=10 μmol) can be used in each coupling cycle of deoxy residues relative to polymer-bound 5′-hydroxyl. Average coupling yields on the 394 Applied Biosystems, Inc. synthesizer, determined by colorimetric quantitation of the trityl fractions, are typically 97.5-99%. Other oligonucleotide synthesis reagents for the 394 Applied Biosystems, Inc. synthesizer include; detritylation solution is 3% TCA in methylene chloride (ABI); capping is performed with 16% N-methyl imidazole in THF (ABI) and 10% acetic anhydride/10% 2,6-lutidine in THF (ABI); and oxidation solution is 16.9 mM I₂, 49 mM pyridine, 9% water in THF (PERSEPTIVE™). Burdick & Jackson Synthesis Grade acetonitrile is used directly from the reagent bottle. S-Ethyltetrazole solution (0.25 M in acetonitrile) is made up from the solid obtained from American International Chemical, Inc. Alternately, for the introduction of phosphorothioate linkages, Beaucage reagent (3H-1,2-Benzodithiol-3-one 1,1-dioxide, 0.05 M in acetonitrile) is used.

[0121] Deprotection of the antisense oligonucleotides is performed as follows: the polymer-bound trityl-on oligoribonucleotide is transferred to a 4 mL glass screw top vial and suspended in a solution of 40% aq. methylamine (1 mL) at 65° C. for 10 min. After cooling to −20 ° C., the supernatant is removed from the polymer support. The support is washed three times with 1.0 mL of EtOH:MeCN:H2O/3:1:1, vortexed and the supernatant is then added to the first supernatant. The combined supernatants, containing the oligoribonucleotide, are dried to a white powder.

[0122] The method of synthesis used for RNA and chemically modified RNA including certain enzymatic nucleic acid molecules follows the procedure as described in Usman et al., 1987, J. Am. Chem. Soc., 109, 7845; Scaringe et al., 1990, Nucleic Acids Res., 18, 5433; and Wincott et al., 1995, Nucleic Acids Res. 23, 2677-2684 Wincott et al., 1997, Methods Mol. Bio., 74, 59, and makes use of common nucleic acid protecting and coupling groups, such as dimethoxytrityl at the 5′-end, and phosphoramidites at the 3′-end. In a non-limiting example, small scale syntheses are conducted on a 394 Applied Biosystems, Inc. synthesizer using a 0.2 μmol scale protocol with a 7.5 min coupling step for alkylsilyl protected nucleotides and a 2.5 min coupling step for 2′-O-methylated nucleotides. Table II outlines the amounts and the contact times of the reagents used in the synthesis cycle. Alternatively, syntheses at the 0.2 μmol scale can be done on a 96-well plate synthesizer, such as the instrument produced by Protogene (Palo Alto, Calif.) with minimal modification to the cycle. A 33-fold excess (60 μL of 0.11 M=6.6 μmol) of 2′-O-methyl phosphoramidite and a 75-fold excess of S-ethyl tetrazole (60 μL of 0.25 M=15 μmol) can be used in each coupling cycle of 2′-O-methyl residues relative to polymer-bound 5′-hydroxyl. A 66-fold excess (120 μL of 0.11 M=13.2 μmol) of alkylsilyl (ribo) protected phosphoramidite and a 150-fold excess of S-ethyl tetrazole (120 μL of 0.25 M=30 μmol) can be used in each coupling cycle of ribo residues relative to polymer-bound 5′-hydroxyl. Average coupling yields on the 394 Applied Biosystems, Inc. synthesizer, determined by colorimetric quantitation of the trityl fractions, are typically 97.5-99%. Other oligonucleotide synthesis reagents for the 394 Applied Biosystems, Inc. synthesizer include; detritylation solution is 3% TCA in methylene chloride (ABI); capping is performed with 16% N-methyl imidazole in THF (ABI) and 10% acetic anhydride/10% 2,6-lutidine in THF (ABI); oxidation solution is 16.9 mM I₂, 49 mM pyridine, 9% water in THF (PERSEPTIVE™). Burdick & Jackson Synthesis Grade acetonitrile is used directly from the reagent bottle. S-Ethyltetrazole solution (0.25 M in acetonitrile) is made up from the solid obtained from American International Chemical, Inc. Alternately, for the introduction of phosphorothioate linkages, Beaucage reagent (3H-1,2-Benzodithiol-3-one 1,1-dioxide 0.05 M in acetonitrile) is used.

[0123] Deprotection of the RNA is performed using either a two-pot or one-pot protocol. For the two-pot protocol, the polymer-bound trityl-on oligoribonucleotide is transferred to a 4 mL glass screw top vial and suspended in a solution of 40% aq. methylamine (1 mL) at 65° C. for 10 min. After cooling to −20 ° C., the supernatant is removed from the polymer support. The support is washed three times with 1.0 mL of EtOH:MeCN:H2O/3:1:1, vortexed and the supernatant is then added to the first supernatant. The combined supernatants, containing the oligoribonucleotide, are dried to a white powder. The base deprotected oligoribonucleotide is resuspended in anhydrous TEA/HF/NMP solution (300 μL of a solution of 1.5 mL N-methylpyrrolidinone, 750 μL TEA and 1 mL TEA.3HF to provide a 1.4 M HF concentration) and heated to 65° C. After 1.5 h, the oligomer is quenched with 1.5 M NH₄HCO₃.

[0124] Alternatively, for the one-pot protocol, the polymer-bound trityl-on oligoribonucleotide is transferred to a 4 mL glass screw top vial and suspended in a solution of 33% ethanolic methylamine/DMSO: 1/1 (0.8 mL) at 65° C. for 15 min. The vial is brought to r.t. TEA3HF (0.1 mL) is added and the vial is heated at 65° C. for 15 min. The sample is cooled at −20° C. and then quenched with 1.5 M NH₄HCO₃.

[0125] For purification of the trityl-on oligomers, the quenched NH₄HCO₃ solution is loaded onto a C-18 containing cartridge that had been prewashed with acetonitrile followed by 50 mM TEAA. After washing the loaded cartridge with water, the RNA is detritylated with 0.5% TFA for 13 min. The cartridge is then washed again with water, salt exchanged with 1 M NaCl and washed with water again. The oligonucleotide is then eluted with 30% acetonitrile.

[0126] Inactive hammerhead ribozymes or binding attenuated control (BAC) oligonucleotides can be synthesized by substituting a U for G₅ and a U for A₁₄ (numbering from Hertel, K. J., et al., 1992, Nucleic Acids Res., 20, 3252). Similarly, one or more nucleotide substitutions can be introduced in other enzymatic nucleic acid molecules to inactivate the molecule and such molecules can serve as a negative control.

[0127] The average stepwise coupling yields are typically >98% (Wincott et al., 1995 Nucleic Acids Res. 23, 2677-2684). Those of ordinary skill in the art will recognize that the scale of synthesis can be adapted to be larger or smaller than the example described above including but not limited to 96 well format, with the ratio of chemicals being used in the reaction adjusted accordingly.

[0128] Alternatively, the nucleic acid molecules of the present invention can be synthesized separately and joined together post-synthetically, for example by ligation (Moore et al., 1992, Science 256, 9923; Draper et al., International PCT publication No. WO 93/23569; Shabarova et al., 1991, Nucleic Acids Research 19, 4247; Bellon et al., 1997, Nucleosides & Nucleotides, 16, 951; Bellon et al., 1997, Bioconjugate Chem. 8, 204).

[0129] The nucleic acid molecules of the present invention are modified extensively to enhance stability by modification with nuclease resistant groups, for example, 2′-amino, 2′-C-allyl, 2′-flouro, 2′-O-methyl, 2′-H (for a review see Usman and Cedergren, 1992, TIBS 17, 34; Usman et al., 1994, Nucleic Acids Symp. Ser. 31, 163). Ribozymes are purified by gel electrophoresis using general methods or are purified by high pressure liquid chromatography (HPLC; See Wincott et al., Supra, the totality of which is hereby incorporated herein by reference) and are re-suspended in water.

[0130] The sequences of the nucleic acid molecules, including enzymatic nucleic acid molecules and antisense, that are chemically synthesized, are shown in Table VII. The sequences of the enzymatic nucleic acid and antisense constructs that are chemically synthesized, are complementary to the Substrate sequences shown in Table VII. Those in the art will recognize that these sequences are representative only of many more such sequences where the enzymatic portion of the ribozyme (all but the binding arms) is altered to affect activity. The enzymatic nucleic acid and antisense construct sequences listed in Tables III to VII can be formed of ribonucleotides or other nucleotides or non-nucleotides. Such enzymatic nucleic acid molecules with enzymatic activity are equivalent to the enzymatic nucleic acid molecules described specifically in the Tables.

[0131] Optimizing Activity of the Nucleic Acid Molecule of the Invention

[0132] Chemically synthesizing nucleic acid molecules with modifications (base, sugar and/or phosphate) that prevent their degradation by serum ribonucleases can increase their potency (see e.g., Eckstein et al., International Publication No. WO 92/07065; Perrault et al., 1990 Nature 344, 565; Pieken et al., 1991, Science 253, 314; Usman and Cedergren, 1992, Trends in Biochem. Sci. 17, 334; Usman et al., International Publication No. WO 93/15187; and Rossi et al., International Publication No. WO 91/03162; Sproat, U.S. Pat. No. 5,334,711; and Burgin et al., supra; all of these describe various chemical modifications that can be made to the base, phosphate and/or sugar moieties of the nucleic acid molecules herein). Modifications which enhance their efficacy in cells, and removal of bases from nucleic acid molecules to shorten oligonucleotide synthesis times and reduce chemical requirements are desired. (All these publications are hereby incorporated by reference herein).

[0133] There are several examples in the art describing sugar, base and phosphate modifications that can be introduced into nucleic acid molecules with significant enhancement in their nuclease stability and efficacy. For example, oligonucleotides are modified to enhance stability and/or enhance biological activity by modification with nuclease resistant groups, for example, 2′-amino, 2′-C-allyl, 2′-flouro, 2′-O-methyl, 2′-H, nucleotide base modifications (for a review see Usman and Cedergren, 1992, TIBS. 17, 34; Usman et al., 1994, Nucleic Acids Symp. Ser. 31, 163; Burgin et al., 1996, Biochemistry , 35, 14090). Sugar modification of nucleic acid molecules have been extensively described in the art (see Eckstein et al., International Publication PCT No. WO 92/07065; Perrault et al. Nature, 1990, 344, 565-568; Pieken et al. Science, 1991, 253, 314-317; Usman and Cedergren, Trends in Biochem. Sci. , 1992, 17, 334-339; Usman et al. International Publication PCT No. WO 93/15187; Sproat, U.S. Pat. No. 5,334,711 and Beigelman et al., 1995, J. Biol. Chem., 270, 25702; Beigelman et al., International PCT publication No. WO 97/26270; Beigelman et al., U.S. Pat. No. 5,716,824; Usman et al., U.S. Pat. No. 5,627,053; Woolf et al., International PCT Publication No. WO 98/13526; Thompson et al., U.S. Ser. No. 60/082,404 which was filed on Apr. 20, 1998; Karpeisky et al., 1998, Tetrahedron Lett., 39, 1131; Earnshaw and Gait, 1998, Biopolymers (Nucleic acid Sciences), 48, 39-55; Verma and Eckstein, 1998, Annu. Rev. Biochem., 67, 99-134; and Burlina et al., 1997, Bioorg. Med. Chem., 5, 1999-2010; all of the references are hereby incorporated in their totality by reference herein). Such publications describe general methods and strategies to determine the location of incorporation of sugar, base and/or phosphate modifications and the like into ribozymes without inhibiting catalysis, and are incorporated by reference herein. In view of such teachings, similar modifications can be used as described herein to modify the nucleic acid molecules of the instant invention.

[0134] While chemical modification of oligonucleotide internucleotide linkages with phosphorothioate, phosphorothioate, and/or 5′-methylphosphonate linkages improves stability, too many of these modifications can cause some toxicity. Therefore when designing nucleic acid molecules the amount of these internucleotide linkages should be minimized. The reduction in the concentration of these linkages should lower toxicity resulting in increased efficacy and higher specificity of these molecules.

[0135] Nucleic acid molecules having chemical modifications that maintain or enhance activity are provided. Such nucleic acid is also generally more resistant to nucleases than unmodified nucleic acid. Thus, in a cell and/or in vivo the activity may not be significantly lowered. Therapeutic nucleic acid molecules delivered exogenously are optimally stable within cells until translation of the target RNA has been inhibited long enough to reduce the levels of the undesirable protein. This period of time varies between hours to days depending upon the disease state. Nucleic acid molecules are preferably resistant to nucleases in order to function as effective intracellular therapeutic agents. Improvements in the chemical synthesis of RNA and DNA (Wincott et al., 1995 Nucleic Acids Res. 23, 2677; Caruthers et al., 1992, Methods in Enzymology 211,3-19 (incorporated by reference herein) have expanded the ability to modify nucleic acid molecules by introducing nucleotide modifications to enhance their nuclease stability as described above.

[0136] Use of the nucleic acid-based molecules of the invention can lead to better treatment of the disease progression by affording the possibility of combination therapies (e.g., multiple antisense or enzymatic nucleic acid molecules targeted to different genes, nucleic acid molecules coupled with known small molecule inhibitors, or intermittent treatment with combinations of molecules (including different motifs) and/or other chemical or biological molecules). The treatment of patients with nucleic acid molecules can also include combinations of different types of nucleic acid molecules.

[0137] Therapeutic nucleic acid molecules (e.g., enzymatic nucleic acid molecules and antisense nucleic acid molecules) delivered exogenously are optimally stable within cells until translation of the target RNA has been inhibited long enough to reduce the levels of the undesirable protein. This period of time varies between hours to days depending upon the disease state. These nucleic acid molecules should be resistant to nucleases in order to function as effective intracellular therapeutic agents. Improvements in the chemical synthesis of nucleic acid molecules described in the instant invention and in the art have expanded the ability to modify nucleic acid molecules by introducing nucleotide modifications to enhance their nuclease stability as described above.

[0138] In one embodiment, nucleic acid catalysts having chemical modifications that maintain or enhance enzymatic activity are provided. Such nucleic acids are also generally more resistant to nucleases than unmodified nucleic acid. Thus, in a cell and/or in vivo the activity of the nucleic acid may not be significantly lowered. As exemplified herein such enzymatic nucleic acids are useful in a cell and/or in vivo even if activity over all is reduced about 10 fold (Burgin et al., 1996, Biochemistry, 35, 14090). Such enzymatic nucleic acids herein are said to “maintain” the enzymatic activity of an all RNA ribozyme or all DNA DNAzyme.

[0139] In another aspect the nucleic acid molecules comprise a 5′ and/or a 3′-cap structure.

[0140] By “cap structure” is meant chemical modifications, which have been incorporated at either terminus of the oligonucleotide (see for example Wincott et al., WO 97/26270, incorporated by reference herein). These terminal modifications protect the nucleic acid molecule from exonuclease degradation, and can help in delivery and/or localization within a cell. The cap can be present at the 5′-terminus (5′-cap) or at the 3′-terminus (3′-cap) or can be present on both terminus. In non-limiting examples, the 5′-cap includes inverted abasic residue (moiety), 4′,5′-methylene nucleotide; 1-(beta-D-erythrofuranosyl) nucleotide, 4′-thio nucleotide, carbocyclic nucleotide; 1,5-anhydrohexitol nucleotide; L-nucleotides; alpha-nucleotides; modified base nucleotide; phosphorodithioate linkage; threo-pentofuranosyl nucleotide; acyclic 3′,4′-seco nucleotide; acyclic 3,4-dihydroxybutyl nucleotide; acyclic 3,5-dihydroxypentyl nucleotide, 3′-3′inverted nucleotide moiety; 3′-3′-inverted abasic moiety; 3′-2′-inverted nucleotide moiety; 3′-2′-inverted abasic moiety; 1,4-butanediol phosphate; 3′-phosphoramidate; hexylphosphate; aminohexyl phosphate; 3′-phosphate; 3′-phosphorothioate; phosphorodithioate; or bridging or non-bridging methylphosphonate moiety (for more details see Wincott et al., International PCT publication No. WO 97/26270, incorporated by reference herein).

[0141] In another embodiment the 3′-cap includes, for example 4′,5′-methylene nucleotide; 1-(beta-D-erythrofuranosyl) nucleotide; 4′-thio nucleotide, carbocyclic nucleotide; 5′-amino-alkyl phosphate; 1,3-diamino-2-propyl phosphate, 3-aminopropyl phosphate; 6-aminohexyl phosphate; 1,2-aminododecyl phosphate; hydroxypropyl phosphate; 1,5-anhydrohexitol nucleotide; L-nucleotide; alpha-nucleotide; modified base nucleotide; phosphorodithioate; threo-pentofuranosyl nucleotide; acyclic 3′,4′-seco nucleotide; 3,4-dihydroxybutyl nucleotide; 3,5-dihydroxypentyl nucleotide, 5′-5′-inverted nucleotide moiety; 5′-5′-inverted abasic moiety; 5′-phosphoramidate; 5′-phosphorothioate; 1,4-butanediol phosphate; 5′-amino; bridging and/or non-bridging 5′-phosphoramidate, phosphorothioate and/or phosphorodithioate, bridging or non bridging methylphosphonate and 5′-mercapto moieties (for more details see Beaucage and Iyer, 1993, Tetrahedron 49, 1925; incorporated by reference herein).

[0142] By the term “non-nucleotide” is meant any group or compound which can be incorporated into a nucleic acid chain in the place of one or more nucleotide units, including either sugar and/or phosphate substitutions, and allows the remaining bases to exhibit their enzymatic activity. The group or compound is abasic in that it does not contain a commonly recognized nucleotide base, such as adenosine, guanine, cytosine, uracil or thymine.

[0143] The term “alkyl” as used herein refers to a saturated aliphatic hydrocarbon, including straight-chain, branched-chain “isoalkyl”, and cyclic alkyl groups. The term “alkyl” also comprises alkoxy, alkyl-thio, alkyl-thio-alkyl, alkoxyalkyl, alkylamino, alkenyl, alkynyl, alkoxy, cycloalkenyl, cycloalkyl, cycloalkylalkyl, heterocycloalkyl, heteroaryl, C1-C6 hydrocarbyl, aryl or substituted aryl groups. Preferably, the alkyl group has 1 to 12 carbons. More preferably it is a lower alkyl of from about 1 to 7 carbons, more preferably about 1 to 4 carbons. The alkyl group can be substituted or unsubstituted. When substituted the substituted group(s) preferably comprise hydroxy, oxy, thio, amino, nitro, cyano, alkoxy, alkyl-thio, alkyl-thio-alkyl, alkoxyalkyl, alkylamino, silyl, alkenyl, alkynyl, alkoxy, cycloalkenyl, cycloalkyl, cycloalkylalkyl, heterocycloalkyl, heteroaryl, C1-C6 hydrocarbyl, aryl or substituted aryl groups. The term “alkyl” also includes alkenyl groups containing at least one carbon-carbon double bond, including straight-chain, branched-chain, and cyclic groups. Preferably, the alkenyl group has about 2 to 12 carbons. More preferably it is a lower alkenyl of from about 2 to 7 carbons, more preferably about 2 to 4 carbons. The alkenyl group can be substituted or unsubstituted. When substituted the substituted group(s) preferably comprise hydroxy, oxy, thio, amino, nitro, cyano, alkoxy, alkyl-thio, alkyl-thio-alkyl, alkoxyalkyl, alkylamino, silyl, alkenyl, alkynyl, alkoxy, cycloalkenyl, cycloalkyl, cycloalkylalkyl, heterocycloalkyl, heteroaryl, C1-C6 hydrocarbyl, aryl or substituted aryl groups. The term “alkyl” also includes alkynyl groups containing at least one carbon-carbon triple bond, including straight-chain, branched-chain, and cyclic groups. Preferably, the alkynyl group has about 2 to 12 carbons. More preferably it is a lower alkynyl of from about 2 to 7 carbons, more preferably about 2 to 4 carbons. The alkynyl group can be substituted or unsubstituted. When substituted the substituted group(s) preferably comprise hydroxy, oxy, thio, amino, nitro, cyano, alkoxy, alkyl-thio, alkyl-thio-alkyl, alkoxyalkyl, alkylamino, silyl, alkenyl, alkynyl, alkoxy, cycloalkenyl, cycloalkyl, cycloalkylalkyl, heterocycloalkyl, heteroaryl, C1-C6 hydrocarbyl, aryl or substituted aryl groups. Alkyl groups or moieties of the invention can also include aryl, alkylaryl, carbocyclic aryl, heterocyclic aryl, amide and ester groups. The preferred substituent(s) of aryl groups are halogen, trihalomethyl, hydroxyl, SH, OH, cyano, alkoxy, alkyl, alkenyl, alkynyl, and amino groups. An “alkylaryl” group refers to an alkyl group (as described above) covalently joined to an aryl group (as described above). Carbocyclic aryl groups are groups wherein the ring atoms on the aromatic ring are all carbon atoms. The carbon atoms are optionally substituted. Heterocyclic aryl groups are groups having from about 1 to 3 heteroatoms as ring atoms in the aromatic ring and the remainder of the ring atoms are carbon atoms. Suitable heteroatoms include oxygen, sulfur, and nitrogen, and include furanyl, thienyl, pyridyl, pyrrolyl, N-lower alkyl pyrrolo, pyrimidyl, pyrazinyl, imidazolyl and the like, all optionally substituted. An “amide” refers to an —C(O)—NH—R, where R is either alkyl, aryl, alkylaryl or hydrogen. An “ester” refers to an —C(O)—OR′, where R is either alkyl, aryl, alkylaryl or hydrogen.

[0144] The term “alkoxyalkyl” as used herein refers to an alkyl-O-alkyl ether, for example methoxyethyl or ethoxymethyl.

[0145] The term “alkyl-thio-alkyl” as used herein refers to an alkyl-S-alkyl thioether, for example methylthiomethyl or methylthioethyl.

[0146] The term “amino” as used herein refers to a nitrogen containing group as is known in the art derived from ammonia by the replacement of one or more hydrogen radicals by organic radicals. For example, the terms “aminoacyl” and “aminoalkyl” refer to specific N-substituted organic radicals with acyl and alkyl substituent groups respectively.

[0147] The term “amination” as used herein refers to a process in which an amino group or substituted amine is introduced into an organic molecule.

[0148] The term “exocyclic amine protecting moiety” as used herein refers to a nucleobase amino protecting group compatible with oligonucleotide synthesis, for example an acyl or amide group.

[0149] The term “alkenyl” as used herein refers to a straight or branched hydrocarbon of a designed number of carbon atoms containing at least one carbon-carbon double bond. Examples of “alkenyl” include vinyl, allyl, and 2-methyl-3-heptene.

[0150] The term “alkoxy” as used herein refers to an alkyl group of indicated number of carbon atoms attached to the parent molecular moiety through an oxygen bridge. Examples of alkoxy groups include, for example, methoxy, ethoxy, propoxy and isopropoxy.

[0151] The term “alkynyl” as used herein refers to a straight or branched hydrocarbon of a designed number of carbon atoms containing at least one carbon-carbon triple bond. Examples of “alkynyl” include propargyl, propyne, and 3-hexyne.

[0152] The term “aryl” as used herein refers to an aromatic hydrocarbon ring system containing at least one aromatic ring. The aromatic ring can optionally be fused or otherwise attached to other aromatic hydrocarbon rings or non-aromatic hydrocarbon rings. Examples of aryl groups include, for example, phenyl, naphthyl, 1,2,3,4-tetrahydronaphthalene and biphenyl. Preferred examples of aryl groups include phenyl and naphthyl.

[0153] The term “cycloalkenyl” as used herein refers to a C3-C8 cyclic hydrocarbon containing at least one carbon-carbon double bond. Examples of cycloalkenyl include cyclopropenyl, cyclobutenyl, cyclopentenyl, cyclopentadiene, cyclohexenyl, 1,3-cyclohexadiene, cycloheptenyl, cycloheptatrienyl, and cyclooctenyl.

[0154] The term “cycloalkyl” as used herein refers to a C3-C8 cyclic hydrocarbon. Examples of cycloalkyl include cyclopropyl, cyclobutyl, cyclopentyl, cyclohexyl, cycloheptyl and cyclooctyl.

[0155] The term “cycloalkylalkyl,” as used herein, refers to a C3-C7 cycloalkyl group attached to the parent molecular moiety through an alkyl group, as defined above. Examples of cycloalkylalkyl groups include cyclopropylmethyl and cyclopentylethyl.

[0156] The terms “halogen” or “halo” as used herein refers to indicate fluorine, chlorine, bromine, and iodine.

[0157] The term “heterocycloalkyl,” as used herein refers to a non-aromatic ring system containing at least one heteroatom selected from nitrogen, oxygen, and sulfur. The heterocycloalkyl ring can be optionally fused to or otherwise attached to other heterocycloalkyl rings and/or non-aromatic hydrocarbon rings. Preferred heterocycloalkyl groups have from 3 to 7 members. Examples of heterocycloalkyl groups include, for example, piperazine, morpholine, piperidine, tetrahydrofuran, pyrrolidine, and pyrazole. Preferred heterocycloalkyl groups include piperidinyl, piperazinyl, morpholinyl, and pyrolidinyl.

[0158] The term “heteroaryl” as used herein refers to an aromatic ring system containing at least one heteroatom selected from nitrogen, oxygen, and sulfur. The heteroaryl ring can be fused or otherwise attached to one or more heteroaryl rings, aromatic or non-aromatic hydrocarbon rings or heterocycloalkyl rings. Examples of heteroaryl groups include, for example, pyridine, furan, thiophene, 5,6,7,8-tetrahydroisoquinoline and pyrimidine. Preferred examples of heteroaryl groups include thienyl, benzothienyl, pyridyl, quinolyl, pyrazinyl, pyrimidyl, imidazolyl, benzimidazolyl, furanyl, benzofuranyl, thiazolyl, benzothiazolyl, isoxazolyl, oxadiazolyl, isothiazolyl, benzisothiazolyl, triazolyl, tetrazolyl, pyrrolyl, indolyl, pyrazolyl, and benzopyrazolyl.

[0159] The term “C1-C6 hydrocarbyl” as used herein refers to straight, branched, or cyclic alkyl groups having 1-6 carbon atoms, optionally containing one or more carbon-carbon double or triple bonds. Examples of hydrocarbyl groups include, for example, methyl, ethyl, propyl, isopropyl, n-butyl, sec-butyl, tert-butyl, pentyl, 2-pentyl, isopentyl, neopentyl, hexyl, 2-hexyl, 3-hexyl, 3-methylpentyl, vinyl, 2-pentene, cyclopropylmethyl, cyclopropyl, cyclohexylmethyl, cyclohexyl and propargyl. When reference is made herein to C1-C6 hydrocarbyl containing one or two double or triple bonds it is understood that at least two carbons are present in the alkyl for one double or triple bond, and at least four carbons for two double or triple bonds.

[0160] By “nucleotide” is meant a heterocyclic nitrogenous base in N-glycosidic linkage with a phosphorylated sugar. Nucleotides are recognized in the art to include natural bases (standard), and modified bases well known in the art. Such bases are generally located at the 1′ position of a nucleotide sugar moiety. Nucleotides generally comprise a base, sugar and a phosphate group. The nucleotides can be unmodified or modified at the sugar, phosphate and/or base moiety, (also referred to interchangeably as nucleotide analogs, modified nucleotides, non-natural nucleotides, non-standard nucleotides and other; see for example, Usman and McSwiggen, supra; Eckstein et al., International PCT Publication No. WO 92/07065; Usman et al., International PCT Publication No. WO 93/15187; Uhlman & Peyman, supra all are hereby incorporated by reference herein). There are several examples of modified nucleic acid bases known in the art as summarized by Limbach et al., 1994, Nucleic Acids Res. 22, 2183. Some of the non-limiting examples of chemically modified and other natural nucleic acid bases that can be introduced into nucleic acids include, for example, inosine, purine, pyridin-4-one, pyridin-2-one, phenyl, pseudouracil, 2,4,6-trimethoxy benzene, 3-methyl uracil, dihydrouridine, naphthyl, aminophenyl, 5-alkylcytidines (e.g., 5-methylcytidine), 5-alkyluridines (e.g., ribothymidine), 5-halouridine (e.g., 5-bromouridine) or 6-azapyrimidines or 6-alkylpyrimidines (e.g. 6-methyluridine), propyne, quesosine, 2-thiouridine, 4-thiouridine, wybutosine, wybutoxosine, 4-acetylcytidine, 5-(carboxyhydroxymethyl)uridine, 5′-carboxymethylaminomethyl-2-thiouridine, 5-carboxymethylaminomethyluridine, beta-D-galactosylqueosine, 1-methyladenosine, 1-methylinosine, 2,2-dimethylguanosine, 3-methylcytidine, 2-methyladenosine, 2-methylguanosine, N6-methyladenosine, 7-methylguanosine, 5-methoxyaminomethyl-2-thiouridine, 5-methylaminomethyluridine, 5-methylcarbonylmethyluridine, 5-methyloxyuridine, 5-methyl-2-thiouridine, 2-methylthio-N6-isopentenyladenosine, beta-D-mannosylqueosine, uridine-5-oxyacetic acid, 2-thiocytidine, threonine derivatives and others (Burgin et al., 1996, Biochemistry, 35, 14090; Uhlman & Peyman, supra). By “modified bases” in this aspect is meant nucleotide bases other than adenine, guanine, cytosine and uracil at 1′ position or their equivalents; such bases can be used at any position, for example, within the catalytic core of an enzymatic nucleic acid molecule and/or in the substrate-binding regions of the nucleic acid molecule.

[0161] By “nucleoside” is meant a heterocyclic nitrogenous base in N-glycosidic linkage with a sugar. Nucleosides are recognized in the art to include natural bases (standard), and modified bases well known in the art. Such bases are generally located at the 1′ position of a nucleoside sugar moiety. Nucleosides generally comprise a base and sugar group. The nucleosides can be unmodified or modified at the sugar, and/or base moiety, (also referred to interchangeably as nucleoside analogs, modified nucleosides, non-natural nucleosides, non-standard nucleosides and other; see for example, Usman and McSwiggen, supra; Eckstein et al., International PCT Publication No. WO 92/07065; Usman et al., International PCT Publication No. WO 93/15187; Uhlman & Peyman, supra all are hereby incorporated by reference herein). There are several examples of modified nucleic acid bases known in the art as summarized by Limbach et al., 1994, Nucleic Acids Res. 22, 2183. Some of the non-limiting examples of chemically modified and other natural nucleic acid bases that can be introduced into nucleic acids include, inosine, purine, pyridin-4-one, pyridin-2-one, phenyl, pseudouracil, 2, 4, 6-trimethoxy benzene, 3-methyl uracil, dihydrouridine, naphthyl, aminophenyl, 5-alkylcytidines (e.g., 5-methylcytidine), 5-alkyluridines (e.g., ribothymidine), 5-halouridine (e.g., 5-bromouridine) or 6-azapyrimidines or 6-alkylpyrimidines (e.g. 6-methyluridine), propyne, quesosine, 2-thiouridine, 4-thiouridine, wybutosine, wybutoxosine, 4-acetylcytidine, 5-(carboxyhydroxymethyl)uridine, 5′-carboxymethylaminomethyl-2-thiouridine, 5-carboxymethylaminomethyluridine, beta-D-galactosylqueosine, 1-methyladenosine, 1-methylinosine, 2,2-dimethylguanosine, 3-methylcytidine, 2-methyladenosine, 2-methylguanosine, N6-methyladenosine, 7-methylguanosine, 5-methoxyaminomethyl-2-thiouridine, 5-methylaminomethyluridine, 5-methylcarbonylmethyluridine, 5-methyloxyuridine, 5-methyl-2-thiouridine, 2-methylthio-N6-isopentenyladenosine, beta-D-mannosylqueosine, uridine-5-oxyacetic acid, 2-thiocytidine, threonine derivatives and others (Burgin et al., 1996, Biochemistry, 35, 14090; Uhlman & Peyman, supra). By “modified bases” in this aspect is meant nucleoside bases other than adenine, guanine, cytosine and uracil at 1′ position or their equivalents; such bases can be used at any position, for example, within the catalytic core of an enzymatic nucleic acid molecule and/or in the substrate-binding regions of the nucleic acid molecule.

[0162] In one embodiment, the invention features modified enzymatic nucleic acid molecules with phosphate backbone modifications comprising one or more phosphorothioate, phosphorodithioate, methylphosphonate, morpholino, amidate carbamate, carboxymethyl, acetamidate, polyamide, sulfonate, sulfonamide, sulfamate, formacetal, thioformacetal, and/or alkylsilyl, substitutions. For a review of oligonucleotide backbone modifications see Hunziker and Leumann, 1995, Nucleic Acid Analogues: Synthesis and Properties, in Modern Synthetic Methods, VCH, 331-417, and Mesmaeker et al., 1994, Novel Backbone Replacements for Oligonucleotides, in Carbohydrate Modifications in Antisense Research, ACS, 24-39. These references are hereby incorporated by reference herein.

[0163] By “abasic” is meant sugar moieties lacking a base or having other chemical groups in place of a base at the 1′ position, for example a 3′,3′-linked or 5′,5′-linked deoxyabasic ribose derivative (for more details see Wincott et al., International PCT publication No. WO 97/26270).

[0164] By “unmodified nucleoside” is meant one of the bases adenine, cytosine, guanine, thymine, uracil joined to the 1′carbon of β-D-ribo-furanose.

[0165] By “modified nucleoside” is meant any nucleotide base which contains a modification in the chemical structure of an unmodified nucleotide base, sugar and/or phosphate.

[0166] In connection with 2′-modified nucleotides as described for the present invention, by “amino” is meant 2′-NH₂ or 2′-O-NH₂, which can be modified or unmodified. Such modified groups are described, for example, in Eckstein et al., U.S. Pat. No. 5,672,695 and Matulic-Adamic et al., WO 98/28317, respectively, which are both incorporated by reference in their entireties.

[0167] Various modifications to nucleic acid (e.g., antisense and ribozyme) structure can be made to enhance the utility of these molecules. For example, such modifications can enhance shelf-life, half-life in vitro, stability, and ease of introduction of such oligonucleotides to the target site, including e.g., enhancing penetration of cellular membranes and conferring the ability to recognize and bind to targeted cells.

[0168] Use of these molecules can lead to better treatment of the disease progression by affording the possibility of combination therapies (e.g., multiple enzymatic nucleic acid molecules targeted to different genes, enzymatic nucleic acid molecules coupled with known small molecule inhibitors, or intermittent treatment with combinations of enzymatic nucleic acid molecules (including different enzymatic nucleic acid molecule motifs) and/or other chemical or biological molecules). The treatment of patients with nucleic acid molecules can also include combinations of different types of nucleic acid molecules. Therapies can be devised which include a mixture of enzymatic nucleic acid molecules (including different enzymatic nucleic acid molecule motifs), antisense and/or 2-5A chimera molecules to one or more targets to alleviate symptoms of a disease.

[0169] Administration of Nucleic Acid Molecules

[0170] Methods for the delivery of nucleic acid molecules are described in Akhtar et al., 1992, Trends Cell Bio., 2, 139; and Delivery Strategies for Antisense Oligonucleotide Therapeutics, ed. Akhtar, 1995 which are both incorporated herein by reference. Sullivan et al., PCT WO 94/02595, further describes the general methods for delivery of enzymatic RNA molecules. These protocols can be utilized for the delivery of virtually any nucleic acid molecule. Nucleic acid molecules can be administered to cells by a variety of methods known to those familiar to the art, including, but not restricted to, encapsulation in liposomes, by iontophoresis, or by incorporation into other vehicles, such as hydrogels, cyclodextrins, biodegradable nanocapsules, and bioadhesive microspheres. Alternatively, the nucleic acid/vehicle combination is locally delivered by direct injection or by use of an infusion pump. Other routes of delivery include, but are not limited to oral (tablet or pill form) and/or intrathecal delivery (Gold, 1997, Neuroscience, 76, 1153-1158). Other approaches include the use of various transport and carrier systems, for example, through the use of conjugates and biodegradable polymers. For a comprehensive review on drug delivery strategies including CNS delivery, see Ho et al., 1999, Curr. Opin. Mol. Ther., 1, 336-343 and Jain, Drug Delivery Systems: Technologies and Commercial Opportunities, Decision Resources, 1998 and Groothuis et al., 1997, J. NeuroVirol., 3, 387-400. More detailed descriptions of nucleic acid delivery and administration are provided in Sullivan et al., supra, Draper et al., PCT WO93/23569, Beigelman et al., PCT WO99/05094, and Klimuk et al., PCT WO99/04819 all of which have been incorporated by reference herein.

[0171] The molecules of the instant invention can be used as pharmaceutical agents. Pharmaceutical agents prevent, inhibit the occurrence, or treat (alleviate a symptom to some extent, preferably all of the symptoms) of a disease state in a patient.

[0172] The negatively charged polynucleotides of the invention can be administered (e.g., RNA, DNA or protein) and introduced into a patient by any standard means, with or without stabilizers, buffers, and the like, to form a pharmaceutical composition. When it is desired to use a liposome delivery mechanism, standard protocols for formation of liposomes can be followed. The compositions of the present invention can also be formulated and used as tablets, capsules or elixirs for oral administration; suppositories for rectal administration; sterile solutions; suspensions for injectable administration; and the other compositions known in the art.

[0173] The present invention also includes pharmaceutically acceptable formulations of the compounds described. These formulations include salts of the above compounds, e.g., acid addition salts, for example, salts of hydrochloric, hydrobromic, acetic acid, and benzene sulfonic acid.

[0174] A pharmacological composition or formulation refers to a composition or formulation in a form suitable for administration, e.g., systemic administration, into a cell or patient, preferably a human. Suitable forms, in part, depend upon the use or the route of entry, for example oral, transdermal, or by injection. Such forms should not prevent the composition or formulation from reaching a target cell (i.e., a cell to which the negatively charged polymer is desired to be delivered to). For example, pharmacological compositions injected into the blood stream should be soluble. Other factors are known in the art, and include considerations such as toxicity and forms which prevent the composition or formulation from exerting its effect.

[0175] By “systemic administration” is meant in vivo systemic absorption or accumulation of drugs in the blood stream followed by distribution throughout the entire body. Administration routes which lead to systemic absorption include, without limitations: intravenous, subcutaneous, intraperitoneal, inhalation, oral, intrapulmonary and intramuscular. Each of these administration routes expose the desired negatively charged polymers, e.g., nucleic acids, to an accessible diseased tissue. The rate of entry of a drug into the circulation has been shown to be a function of molecular weight or size. The use of a liposome or other drug carrier comprising the compounds of the instant invention can potentially localize the drug, for example, in certain tissue types, such as the tissues of the reticular endothelial system (RES). A liposome formulation which can facilitate the association of drug with the surface of cells, such as, lymphocytes and macrophages is also useful. This approach can provide enhanced delivery of the drug to target cells by taking advantage of the specificity of macrophage and lymphocyte immune recognition of abnormal cells, such as cancer cells.

[0176] By pharmaceutically acceptable formulation is meant, a composition or formulation that allows for the effective distribution of the nucleic acid molecules of the instant invention in the physical location most suitable for their desired activity. Non-limiting examples of agents suitable for formulation with the nucleic acid molecules of the instant invention include: PEG conjugated nucleic acids, phospholipid conjugated nucleic acids, nucleic acids containing lipophilic moieties, phosphorothioates, P-glycoprotein inhibitors (such as Pluronic P85) which can enhance entry of drugs into various tissues, for example the CNS (Jolliet-Riant and Tillement, 1999, Fundam. Clin. Pharmacol., 13, 16-26); biodegradable polymers, such as poly (DL-lactide-coglycolide) microspheres for sustained release delivery after implantation (Emerich, D F et al., 1999, Cell Transplant, 8, 47-58) Alkermes, Inc. Cambridge, Mass.; and loaded nanoparticles, such as those made of polybutylcyanoacrylate, which can deliver drugs across the blood brain barrier and can alter neuronal uptake mechanisms (Prog Neuropsychopharmacol Biol Psychiatry, 23, 941-949, 1999). Other non-limiting examples of delivery strategies, including CNS delivery of the nucleic acid molecules of the instant invention include material described in Boado et al., 1998, J. Pharm. Sci., 87, 1308-1315; Tyler et al., 1999, FEBS Lett., 421, 280-284; Pardridge et al., 1995, PNAS USA., 92, 5592-5596; Boado, 1995, Adv. Drug Delivery Rev., 15, 73-107; Aldrian-Herrada et al., 1998, Nucleic Acids Res., 26, 4910-4916; and Tyler et al., 1999, PNAS USA., 96, 7053-7058. All these references are hereby incorporated herein by reference.

[0177] The invention also features the use of the composition comprising surface-modified liposomes containing poly (ethylene glycol) lipids (PEG-modified, or long-circulating liposomes or stealth liposomes). Nucleic acid molecules of the invention can also comprise covalently attached PEG molecules of various molecular weights. These formulations offer a method for increasing the accumulation of drugs in target tissues. This class of drug carriers resists opsonization and elimination by the mononuclear phagocytic system (MPS or RES), thereby enabling longer blood circulation times and enhanced tissue exposure for the encapsulated drug (Lasic et al. Chem. Rev. 1995, 95, 2601-2627; Ishiwata et al., Chem. Pharm. Bull. 1995, 43, 1005-1011). Such liposomes have been shown to accumulate selectively in tumors, presumably by extravasation and capture in the neovascularized target tissues (Lasic et al., Science 1995, 267, 1275-1276; Oku et al.,1995, Biochim. Biophys. Acta, 1238, 86-90). The long-circulating liposomes enhance the pharmacokinetics and pharmacodynamics of DNA and RNA, particularly compared to conventional cationic liposomes which are known to accumulate in tissues of the MPS (Liu et al., J. Biol. Chem. 1995, 42, 24864-24870; Choi et al., International PCT Publication No. WO 96/10391; Ansell et al., International PCT Publication No. WO 96/10390; Holland et al., International PCT Publication No. WO 96/10392; all of which are incorporated by reference herein). Long-circulating liposomes are also likely to protect drugs from nuclease degradation to a greater extent compared to cationic liposomes, based on their ability to avoid accumulation in metabolically aggressive MPS tissues such as the liver and spleen. All of these references are incorporated by reference herein.

[0178] The present invention also includes compositions prepared for storage or administration which include a pharmaceutically effective amount of the desired compounds in a pharmaceutically acceptable carrier or diluent. Acceptable carriers or diluents for therapeutic use are well known in the pharmaceutical art, and are described, for example, in Remington's Pharmaceutical Sciences, Mack Publishing Co. (A. R. Gennaro edit. 1985) hereby incorporated by reference herein. For example, preservatives, stabilizers, dyes and flavoring agents can be provided. These include sodium benzoate, sorbic acid and esters of p-hydroxybenzoic acid. In addition, antioxidants and suspending agents can be used.

[0179] A pharmaceutically effective dose is that dose required to prevent, inhibit the occurrence, or treat (alleviate a symptom to some extent, preferably all of the symptoms) of a disease state. The pharmaceutically effective dose depends on the type of disease, the composition used, the route of administration, the type of mammal being treated, the physical characteristics of the specific mammal under consideration, concurrent medication, and other factors which those skilled in the medical arts will recognize. Generally, an amount between 0.1 mg/kg and 100 mg/kg body weight/day of active ingredients is administered dependent upon potency of the negatively charged polymer.

[0180] The nucleic acid molecules of the invention and formulations thereof can be administered orally, topically, parenterally, by inhalation or spray or rectally in dosage unit formulations containing conventional non-toxic pharmaceutically acceptable carriers, adjuvants and vehicles. The term parenteral as used herein includes percutaneous, subcutaneous, intravascular (e.g., intravenous), intramuscular, or intrathecal injection or infusion techniques and the like. In addition, there is provided a pharmaceutical formulation comprising a nucleic acid molecule of the invention and a pharmaceutically acceptable carrier. One or more nucleic acid molecules of the invention can be present in association with one or more non-toxic pharmaceutically acceptable carriers and/or diluents and/or adjuvants, and if desired other active ingredients. The pharmaceutical compositions containing nucleic acid molecules of the invention can be in a form suitable for oral use, for example, as tablets, troches, lozenges, aqueous or oily suspensions, dispersible powders or granules, emulsion, hard or soft capsules, or syrups or elixirs.

[0181] Compositions intended for oral use can be prepared according to any method known to the art for the manufacture of pharmaceutical compositions and such compositions can contain one or more such sweetening agents, flavoring agents, coloring agents or preservative agents in order to provide pharmaceutically elegant and palatable preparations. Tablets contain the active ingredient in admixture with non-toxic pharmaceutically acceptable excipients that are suitable for the manufacture of tablets. These excipients can be for example, inert diluents, such as calcium carbonate, sodium carbonate, lactose, calcium phosphate or sodium phosphate; granulating and disintegrating agents, for example, corn starch, or alginic acid; binding agents, for example starch, gelatin or acacia, and lubricating agents, for example magnesium stearate, stearic acid or talc. The tablets can be uncoated or they can be coated by known techniques. In some cases such coatings can be prepared by known techniques to delay disintegration and absorption in the gastrointestinal tract and thereby provide a sustained action over a longer period. For example, a time delay material such as glyceryl monosterate or glyceryl distearate can be employed.

[0182] Formulations for oral use can also be presented as hard gelatin capsules wherein the active ingredient is mixed with an inert solid diluent, for example, calcium carbonate, calcium phosphate or kaolin, or as soft gelatin capsules wherein the active ingredient is mixed with water or an oil medium, for example peanut oil, liquid paraffin or olive oil.

[0183] Aqueous suspensions contain the active materials in admixture with excipients suitable for the manufacture of aqueous suspensions. Such excipients are suspending agents, for example sodium carboxymethylcellulose, methylcellulose, hydropropyl-methylcellulose, sodium alginate, polyvinylpyrrolidone, gum tragacanth and gum acacia; dispersing or wetting agents can be a naturally-occurring phosphatide, for example, lecithin, or condensation products of an alkylene oxide with fatty acids, for example polyoxyethylene stearate, or condensation products of ethylene oxide with long chain aliphatic alcohols, for example heptadecaethyleneoxycetanol, or condensation products of ethylene oxide with partial esters derived from fatty acids and a hexitol such as polyoxyethylene sorbitol monooleate, or condensation products of ethylene oxide with partial esters derived from fatty acids and hexitol anhydrides, for example polyethylene sorbitan monooleate. The aqueous suspensions can also contain one or more preservatives, for example ethyl, or n-propyl p-hydroxybenzoate, one or more coloring agents, one or more flavoring agents, and one or more sweetening agents, such as sucrose or saccharin.

[0184] Oily suspensions can be formulated by suspending the active ingredients in a vegetable oil, for example arachis oil, olive oil, sesame oil or coconut oil, or in a mineral oil such as liquid paraffin. The oily suspensions can contain a thickening agent, for example beeswax, hard paraffin or cetyl alcohol. Sweetening agents and flavoring agents can be added to provide palatable oral preparations. These compositions can be preserved by the addition of an anti-oxidant such as ascorbic acid.

[0185] Dispersible powders and granules suitable for preparation of an aqueous suspension by the addition of water provide the active ingredient in admixture with a dispersing or wetting agent, suspending agent and one or more preservatives. Suitable dispersing or wetting agents or suspending agents are exemplified by those already mentioned above. Additional excipients, for example sweetening, flavoring and coloring agents, can also be present.

[0186] Pharmaceutical compositions of the invention can also be in the form of oil-in-water emulsions. The oily phase can be a vegetable oil or a mineral oil or mixtures of these. Suitable emulsifying agents can be naturally-occurring gums, for example gum acacia or gum tragacanth, naturally-occurring phosphatides, for example soy bean, lecithin, and esters or partial esters derived from fatty acids and hexitol, anhydrides, for example sorbitan monooleate, and condensation products of the said partial esters with ethylene oxide, for example polyoxyethylene sorbitan monooleate. The emulsions can also contain sweetening and flavoring agents.

[0187] Syrups and elixirs can be formulated with sweetening agents, for example glycerol, propylene glycol, sorbitol, glucose or sucrose. Such formulations can also contain a demulcent, a preservative and flavoring and coloring agents. The pharmaceutical compositions can be in the form of a sterile injectable aqueous or oleaginous suspension. This suspension can be formulated according to the known art using those suitable dispersing or wetting agents and suspending agents that have been mentioned above. The sterile injectable preparation can also be a sterile injectable solution or suspension in a non-toxic parentally acceptable diluent or solvent, for example as a solution in 1,3-butanediol. Among the acceptable vehicles and solvents that can be employed are water, Ringer's solution and isotonic sodium chloride solution. In addition, sterile, fixed oils are conventionally employed as a solvent or suspending medium. For this purpose any bland fixed oil can be employed including synthetic mono-or diglycerides. In addition, fatty acids such as oleic acid find use in the preparation of injectables.

[0188] The nucleic acid molecules of the invention can also be administered in the form of suppositories, e.g., for rectal administration of the drug. These compositions can be prepared by mixing the drug with a suitable non-irritating excipient that is solid at ordinary temperatures but liquid at the rectal temperature and will therefore melt in the rectum to release the drug. Such materials include cocoa butter and polyethylene glycols.

[0189] Nucleic acid molecules of the invention can be administered parenterally in a sterile medium. The drug, depending on the vehicle and concentration used, can either be suspended or dissolved in the vehicle. Advantageously, adjuvants such as local anesthetics, preservatives and buffering agents can be dissolved in the vehicle.

[0190] Dosage levels of the order of from about 0.1 mg to about 140 mg per kilogram of body weight per day are useful in the treatment of the above-indicated conditions (about 0.5 mg to about 7 g per patient per day). The amount of active ingredient that can be combined with the carrier materials to produce a single dosage form varies depending upon the host treated and the particular mode of administration. Dosage unit forms generally contain between from about 1 mg to about 500 mg of an active ingredient.

[0191] It is understood that the specific dose level for any particular patient depends upon a variety of factors including the activity of the specific compound employed, the age, body weight, general health, sex, diet, time of administration, route of administration, and rate of excretion, drug combination and the severity of the particular disease undergoing therapy.

[0192] For administration to non-human animals, the composition can also be added to the animal feed or drinking water. It can be convenient to formulate the animal feed and drinking water compositions so that the animal takes in a therapeutically appropriate quantity of the composition along with its diet. It can also be convenient to present the composition as a premix for addition to the feed or drinking water.

[0193] The nucleic acid molecules of the present invention can also be administered to a patient in combination with other therapeutic compounds to increase the overall therapeutic effect. The use of multiple compounds to treat an indication can increase the beneficial effects while reducing the presence of side effects.

[0194] Alternatively, certain of the nucleic acid molecules of the instant invention can be expressed within cells from eukaryotic promoters (e.g., Izant and Weintraub, 1985, Science, 229, 345; McGarry and Lindquist, 1986, Proc. Natl. Acad. Sci., USA 83, 399; Scanlon et al., 1991, Proc. Natl. Acad. Sci. USA, 88, 10591-5; Kashani-Sabet et al., 1992, Antisense Res. Dev., 2,3-15; Dropulic et al., 1992, J. Virol., 66, 1432-41; Weerasinghe et al., 1991, J. Virol., 65, 5531-4; Ojwang et al., 1992, Proc. Natl. Acad. Sci. USA, 89, 10802-6; Chen et al., 1992, Nucleic Acids Res., 20, 4581-9; Sarver et al., 1990 Science, 247, 1222-1225; Thompson et al., 1995, Nucleic Acids Res., 23, 2259; Good et al., 1997, Gene Therapy, 4, 45; all of these references are hereby incorporated in their totalities by reference herein). Those skilled in the art realize that any nucleic acid can be expressed in eukaryotic cells from the appropriate DNA/RNA vector. The activity of such nucleic acids can be augmented by their release from the primary transcript by a enzymatic nucleic acid (Draper et al., PCT WO 93/23569, and Sullivan et al., PCT WO 94/02595; Ohkawa et al., 1992, Nucleic Acids Symp. Ser., 27, 15-6; Taira et al., 1991, Nucleic Acids Res., 19, 5125-30; Ventura et al., 1993, Nucleic Acids Res., 21, 3249-55; Chowrira et al., 1994, J. Biol. Chem., 269, 25856; all of these references are hereby incorporated in their totalities by reference herein). Gene therapy approaches specific to the CNS are described by Blesch et al., 2000, Drug News Perspect., 13, 269-280; Peterson et al. 2000, Cent. Nerv. Syst. Dis., 485-508; Peel and Klein, 2000, J. Neurosci. Methods, 98, 95-104; Hagihara et al., 2000, Gene Ther., 7, 759-763; and Herrlinger et al., 2000, Methods Mol. Med., 35, 287-312. AAV-mediated delivery of nucleic acid to cells of the nervous system is further described by Kaplitt et al., U.S. Pat. No. 6,180,613.

[0195] In another aspect of the invention, RNA molecules of the present invention are preferably expressed from transcription units (see for example Couture et al., 1996, TIG., 12, 510) inserted into DNA or RNA vectors. The recombinant vectors are preferably DNA plasmids or viral vectors. Ribozyme expressing viral vectors can be constructed based on, but not limited to, adeno-associated virus, retrovirus, adenovirus, or alphavirus. Preferably, the recombinant vectors capable of expressing the nucleic acid molecules are delivered as described above, and persist in target cells. Alternatively, viral vectors can be used that provide for transient expression of nucleic acid molecules. Such vectors can be repeatedly administered as necessary. Once expressed, the nucleic acid molecule binds to the target mRNA. Delivery of nucleic acid molecule expressing vectors can be systemic, such as by intravenous or intramuscular administration, by administration to target cells ex-planted from the patient followed by reintroduction into the patient, or by any other means that would allow for introduction into the desired target cell (for a review see Couture et al., 1996, TIG., 12, 510).

[0196] In one aspect the invention features an expression vector comprising a nucleic acid sequence encoding at least one of the nucleic acid molecules of the instant invention is disclosed. The nucleic acid sequence encoding the nucleic acid molecule of the instant invention is operable linked in a manner which allows expression of that nucleic acid molecule.

[0197] In another aspect the invention features an expression vector comprising: a) a transcription initiation region (e.g., eukaryotic pol I, II or III initiation region); b) a transcription termination region (e.g., eukaryotic pol I, II or III termination region); c) a nucleic acid sequence encoding at least one of the nucleic acid catalyst of the instant invention; and wherein said sequence is operably linked to said initiation region and said termination region, in a manner which allows expression and/or delivery of said nucleic acid molecule. The vector can optionally include an open reading frame (ORF) for a protein operably linked on the 5′ side or the 3′-side of the sequence encoding the nucleic acid catalyst of the invention; and/or an intron (intervening sequences).

[0198] Transcription of the nucleic acid molecule sequences are driven from a promoter for eukaryotic RNA polymerase I (pol I), RNA polymerase II (pol II), or RNA polymerase III (pol III). Transcripts from pol II or pol III promoters are expressed at high levels in all cells; the levels of a given pol II promoter in a given cell type depends on the nature of the gene regulatory sequences (enhancers, silencers, etc.) present nearby. Prokaryotic RNA polymerase promoters are also used, providing that the prokaryotic RNA polymerase enzyme is expressed in the appropriate cells (Elroy-Stein and Moss, 1990, Proc. Natl. Acad. Sci. U S A, 87, 6743-7; Gao and Huang 1993, Nucleic Acids Res., 21, 2867-72; Lieber et al., 1993, Methods Enzymol., 217, 47-66; Zhou et al., 1990, Mol. Cell. Biol., 10, 4529-37). All of these references are incorporated by reference herein. Several investigators have demonstrated that nucleic acid molecules, such as ribozymes expressed from such promoters can function in mammalian cells (e.g. Kashani-Sabet et al., 1992, Antisense Res. Dev., 2, 3-15; Ojwang et al., 1992, Proc. Natl. Acad. Sci. U S A, 89, 10802-6; Chen et al., 1992, Nucleic Acids Res., 20, 4581-9; Yu et al., 1993, Proc. Natl. Acad. Sci. U S A, 90, 6340-4; L'Huillier et al., 1992, EMBO J., 11, 4411-8; Lisziewicz et al., 1993, Proc. Natl. Acad. Sci. U. S. A, 90, 8000-4; Thompson et al., 1995, Nucleic Acids Res., 23, 2259; Sullenger & Cech, 1993, Science, 262, 1566). More specifically, transcription units such as the ones derived from genes encoding U6 small nuclear (snRNA), transfer RNA (tRNA) and adenovirus VA RNA are useful in generating high concentrations of desired RNA molecules such as ribozymes in cells (Thompson et al., supra; Couture and Stinchcomb, 1996, supra; Noonberg et al., 1994, Nucleic Acid Res., 22, 2830; Noonberg et al., U.S. Pat. No. 5,624,803; Good et al., 1997, Gene Ther., 4,45; Beigelman et al., International PCT Publication No. WO 96/18736; all of these publications are incorporated by reference herein. The above ribozyme transcription units can be incorporated into a variety of vectors for introduction into mammalian cells, including but not restricted to, plasmid DNA vectors, viral DNA vectors (such as adenovirus or adeno-associated virus vectors), or viral RNA vectors (such as retroviral or alphavirus vectors) (for a review see Couture and Stinchcomb, 1996, supra).

[0199] In another aspect the invention features an expression vector comprising nucleic acid sequence encoding at least one of the nucleic acid molecules of the invention, in a manner which allows expression of that nucleic acid molecule. The expression vector comprises in one embodiment; a) a transcription initiation region; b) a transcription termination region; c) a nucleic acid sequence encoding at least one said nucleic acid molecule; and wherein said sequence is operably linked to said initiation region and said termination region, in a manner which allows expression and/or delivery of said nucleic acid molecule.

[0200] In another embodiment the expression vector comprises: a) a transcription initiation region; b) a transcription termination region; c) an open reading frame; d) a nucleic acid sequence encoding at least one said nucleic acid molecule, wherein said sequence is operably linked to the 3′-end of said open reading frame; and wherein said sequence is operably linked to said initiation region, said open reading frame and said termination region, in a manner which allows expression and/or delivery of said nucleic acid molecule. In yet another embodiment the expression vector comprises: a) a transcription initiation region; b) a transcription termination region; c) an intron; d) a nucleic acid sequence encoding at least one said nucleic acid molecule; and wherein said sequence is operably linked to said initiation region, said intron and said termination region, in a manner which allows expression and/or delivery of said nucleic acid molecule.

[0201] In another embodiment, the expression vector comprises: a) a transcription initiation region; b) a transcription termination region; c) an intron; d) an open reading frame; e) a nucleic acid sequence encoding at least one said nucleic acid molecule, wherein said sequence is operably linked to the 3′-end of said open reading frame; and wherein said sequence is operably linked to said initiation region, said intron, said open reading frame and said termination region, in a manner which allows expression and/or delivery of said nucleic acid molecule.

### EXAMPLES

[0202] The following are non-limiting examples showing the selection, isolation, synthesis and activity of nucleic acids of the instant invention.

[0203] The following examples demonstrate the selection and design of Antisense, hammerhead, DNAzyme, NCH, Amberzyme, Zinzyme, or G-Cleaver ribozyme molecules and binding/cleavage sites within REL-A RNA.

### Example 1

### Identification of Potential Target Sites in Human REL-A RNA

[0204] The sequence of human REL-A genes are screened for accessible sites using a computer-folding algorithm. Regions of the RNA that do not form secondary folding structures and contained potential enzymatic nucleic acid molecule and/or antisense binding/cleavage sites are identified. The sequences of these binding/cleavage sites are shown in Tables III-VII.

### Example 2

### Selection of Enzymatic Nucleic Acid Cleavage Sites in Human REL-A RNA

[0205] Enzymatic nucleic acid molecule target sites are chosen by analyzing sequences of Human REL-A (Genbank accession No: NM_{—}005228) and prioritizing the sites on the basis of folding. Enzymatic nucleic acid molecules are designed that can bind each target and are individually analyzed by computer folding (Christoffersen et al., 1994 J. Mol. Struc. Theochem, 311, 273; Jaeger et al., 1989, Proc. Natl. Acad. Sci. USA, 86, 7706) to assess whether the enzymatic nucleic acid molecule sequences fold into the appropriate secondary structure. Those enzymatic nucleic acid molecules with unfavorable intramolecular interactions between the binding arms and the catalytic core are eliminated from consideration. As noted below, varying binding arm lengths can be chosen to optimize activity. Generally, at least 5 bases on each arm are able to bind to, or otherwise interact with, the target RNA.

### Example 3

### Chemical Synthesis and Purification of Ribozymes and Antisense for Efficient Cleavage and/or blocking of REL-A RNA

[0206] Enzymatic nucleic acid molecules and antisense constructs are designed to anneal to various sites in the RNA message. The binding arms of the enzymatic nucleic acid molecules are complementary to the target site sequences described above, while the antisense constructs are fully complementary to the target site sequences described above. The enzymatic nucleic acid molecules and antisense constructs were chemically synthesized. The method of synthesis used followed the procedure for normal RNA synthesis as described above and in Usman et al., (1987 J. Am. Chem. Soc., 109, 7845), Scaringe et al., (1990 Nucleic Acids Res., 18, 5433) and Wincott et al., supra, and made use of common nucleic acid protecting and coupling groups, such as dimethoxytrityl at the 5′-end, and phosphoramidites at the 3′-end. The average stepwise coupling yields were typically >98%.

[0207] Enzymatic nucleic acid molecules and antisense constructs are also synthesized from DNA templates using bacteriophage T7 RNA polymerase (Milligan and Uhlenbeck, 1989, Methods Enzymol. 180, 51). Enzymatic nucleic acid molecules and antisense constructs are purified by gel electrophoresis using general methods or are purified by high pressure liquid chromatography (HPLC; See Wincott et al., supra; the totality of which is hereby incorporated herein by reference) and are resuspended in water. The sequences of the chemically synthesized enzymatic nucleic acid molecules used in this study are shown below in Table VII. The sequences of the chemically synthesized antisense constructs used in this study are complementary sequences to the Substrate sequences shown below as in Tables III to VII.

### Example 4

### Enzymatic Nucleic Acid Molecule Cleavage of REL-A RNA Target in Vitro

[0208] Enzymatic nucleic acid molecules targeted to the human REL-A RNA are designed and synthesized as described above. These enzymatic nucleic acid molecules can be tested for cleavage activity in vitro, for example, using the following procedure. The target sequences and the nucleotide location within the REL-A RNA are given in Tables III-VII.

[0209] Cleavage Reactions: Full-length or partially full-length, internally-labeled target RNA for enzymatic nucleic acid molecule cleavage assay is prepared by in vitro transcription in the presence of [a-³²P] CTP, passed over a G 50 Sephadex column by spin chromatography and used as substrate RNA without further purification. Alternately, substrates are 5′-³²P-end labeled using T4 polynucleotide kinase enzyme. Assays are performed by pre-warming a 2× concentration of purified enzymatic nucleic acid molecule in enzymatic nucleic acid molecule cleavage buffer (50 mM Tris-HCl, pH 7.5 at 37° C., 10 mM MgCl₂) and the cleavage reaction was initiated by adding the 2× enzymatic nucleic acid molecule mix to an equal volume of substrate RNA (maximum of 1-5 nM) that was also pre-warmed in cleavage buffer. As an initial screen, assays are carried out for 1 hour at 37° C. using a final concentration of either 40 nM or 1 mM enzymatic nucleic acid molecule, i.e., enzymatic nucleic acid molecule excess. The reaction is quenched by the addition of an equal volume of 95% formamide, 20 mM EDTA, 0.05% bromophenol blue and 0.05% xylene cyanol after which the sample is heated to 95° C. for 2 minutes, quick chilled and loaded onto a denaturing polyacrylamide gel. Substrate RNA and the specific RNA cleavage products generated by enzymatic nucleic acid molecule cleavage are visualized on an autoradiograph of the gel. The percentage of cleavage is determined by Phosphor Imager® quantitation of bands representing the intact substrate and the cleavage products.

### Example 5

### Nucleic Acid Down-regulation of REL-A target RNA in vivo

[0210] Nucleic acid molecules targeted to the human REL-A RNA are designed and synthesized as described above. These nucleic acid molecules can be tested for cleavage activity in vivo, for example using the procedures described below. The target sequences and the nucleotide location within the REL-A RNA are given in Tables III-VII.

### Example 6

### In vivo Models used to Evaluate the Down-regulation of REL-A Gene Expression

[0211] A variety of endpoints have been used in cell culture models to evaluate REL-A-mediated effects after treatment with anti-REL-A agents. Phenotypic endpoints include inhibition of cell proliferation, apoptosis assays and reduction of REL-A protein expression. Because overexpression of REL-A is directly associated with increased proliferation of tumor cells, a proliferation endpoint for cell culture assays is preferably used as a primary screen. There are several methods by which this endpoint can be measured. Following treatment of cells with nucleic acid molecules, cells are allowed to grow (typically 5 days) after which either the cell viability, the incorporation of [³H] thymidine into cellular DNA and/or the cell density can be measured. The assay of cell density is very straightforward and can be performed in a 96-well format using commercially available fluorescent nucleic acid stains (such as Syto® 13 or CyQuant®). The assay using CyQuant® is described herein

[0212] As a secondary, confirmatory endpoint a nucleic acid-mediated decrease in the level of REL-A RNA and/or REL-A protein expression can be evaluated.

[0213] Cell Culture

[0214] Cell types that express/over-express NFKB include HeLa, macrophages, peripheral blood lymphocytes, hepatocytes, fibroblasts, endothelial cells and epithelial cells. In culture, these cells can be stimulated to express/over-express NFKB by addition of TNF-alpha PMA or IL-1-beta to the culture medium. Some of these cell types also may respond with a similar activation of NFKB following LPS treatment. Activation of NFKB in cultured cells can be evaluated by electrophoretic mobility shift assay (EMSA). Delineation of alterations in the subunits can be determined by Western blot.

[0215] Primary Screen

[0216] A usefult cell culture system is human colonic epithelial cells. One suitable cell line is SW620 colon carcinoma cells (CCL227). These cells respond to stimulation with TNF-alpha, LPS and/or IL-1-beta with an increase in NFKB activation. SW620 cells are grown in MEM supplemented with 10% heat-inactivated FBS and glutamine (2 mmol/L).

[0217] TNF-alpha dose-response curves in these cells are determined by incubating cells with various concentrations of recombinant human TNF-alpha (Sigma Chemical Co.). Maximal DNA binding activity induction can occur with 150 U/ml TNF-alpha in the culture medium. Induction is typically evident within 10 minutes of treatment with TNF-alpha reaches a peak at one hour post-treatment and persists for up to 4 hours post-treatment. The primary readout can be NFKB DNA activity in nuclear extracts of SW620 cells as determined by electrophoretic mobility shift assays (EMSA). Once the appropriate TNF-alpha dose/response profile has been determined, inhibition of NFKB activation is evaluated using specific and non-specific inhibitors of activation, sultasalazine and steroids, respectively. Cells are incubated with inhibitors or control media for 30 minutes prior to stimulation with TNF-alpha Nuclear extracts are prepared and evaluated for DNA binding activity by EMSA. Once the activity of positive controls has been established, enzymatic nucleic acids targeting the REL-A subunit of NFKB are evaluated in this system. Supershift assays using polyclonal antibodies against the NFKB protein subunits can be performed to confirm down-regulation of the REL-A component of the heterodimer.

[0218] Secondary Screens

[0219] SW620 cells can be transfected with the 3xIg-kappa-B-Luc reporter construct 18 hours before challenge with TNF-alpha, LPS or PMA. The readout for this assay is luciferase activity. Test compounds are applied 17.5 hours after transfection (30 minutes before challenge). Cells are harvested 24 hours after challenge and relative changes in luciferase activity is used as the endpoint. Lastly, the activation of NFKB can be visualized fluorescently. Inactive NFKB heterodimers are held in the cytoplasm by inhibitory proteins. Once activated, the free heterodimers translocate to the nucleus. Thus, the relative change in cytoplasmic versus nuclear fluorescence can indicate the degree of NFKB activation. Cells can be grown on chamber slides, treated with TNF-alpha with and without test compounds), and the location of the REL-A subunit can be determined by immunofluorescence using a FITC-labeled antibody to REL-A.

[0220] Animal Models

[0221] Evaluating the efficacy of anti-REL-A/NFKB agents in animal models is an important prerequisite to human clinical trials. Studies have shown that human breast carcinoma cell lines express high levels of REL-A/NFKB (Sovak et al., 1997, J. Clin. Invest., 100, 2952-2960). High levels of REL-A/NFKB have also been observed in carcinogen-induced primary rat mammary tumors and in human breast cancer specimins. Additionally, HER2/neu overexpression has been shown to activate NFKB (Pianetti et al., 2001, Oncogene, 20, 1287-1299). As such, xenografts of cell lines that over-express NFKB can be used in animal models of tumorigenesis and/or inflammation to study the inhibition of REL-A/NFKB.

[0222] Oncology Animal Model Development

[0223] Tumor cell lines are characterized to establish their growth curves in mice. These cell lines are implanted into both nude and SCID mice and primary tumor volumes are measured 3 times per week. Growth characteristics of these tumor lines using a Matrigel implantation format can also be established. The use of other cell lines that have been engineered to express high levels of REL-A can also be used in the described studies. The tumor cell line(s) and implantation method that supports the most consistent and reliable tumor growth is used in animal studies testing the lead REL-A nucleic acid(s). Nucleic acids are administered by daily subcutaneous injection or by continuous subcutaneous infusion from Alzet mini osmotic pumps beginning 3 days after tumor implantation and continuing for the duration of the study. Group sizes of at least 10 animals are employed. Efficacy is determined by statistical comparison of tumor volume of nucleic acid-treated animals to a control group of animals treated with saline alone. Because the growth of these tumors is generally slow (45-60 days), an initial endpoint is the time in days it takes to establish an easily measurable primary tumor (i.e. 50-100 mm³) in the presence or absence of nucleic acid treatment.

[0224] Inflammation Animal Model Development

[0225] Chronic, sublethal administration of indomethacin to outbred rats produces an enteropathy characterized by thickening of the small intestine and mesentery, ulcerations, granulomatous inflammation, crypt abcesses and adhesions. These lesions are similar to those that are characteristic findings in human patients with Crohn's disease (CD). Thus, any beneficial therapeutic effects revealed using this model can be extrapolated to potential benefit for patients with CD.

[0226] Male Sprague-Dawley rats (200-275 g) are utilized for these studies. Chronic intestinal inflammation is induced by two subcutaneous injections of indomethacin (7.5 mg/kg in 5% NaHCO3) administered on subsequent days (Day-0 and Day-1). Animals are followed for four days following the first indomethacin injection. The mortality rate associated with this model is typically less than 10%. On the last day of the study, animals are euthanized by CO2 asphyxiation, small intestines excised and gross pathologic findings ranked according to the following criteria: 0, normal ; 1, minimal abnormalities, slight thickening of the small intestine, no adhesions; 2, obvious thickening of small intestine with 1 adhesion; 3, obvious thickening of small intestine with 2 or 3 adhesions; 4, massive adhesions to the extent that the intestine cannot be separated, contents primarily fluid; 5, severe peritonitis resulting in death. A 10-cm portion of the most affected region of the small intestine is weighed, placed in 10% neutral buffered formalin and submitted for histopathologic evaluation.

[0227] The 10 cm portion of gut from each animal is cut into five equal sections. Transverse and longitudinal sections of each portion are cut and stained with hematoxylin and eosin. All slides are read in a blinded fashion and each section is scored for necrosis (% area of involvement) and inflammatory response according to the following scale:

[0228] Necrosis 1, 10%; 2, 10-25%; 3, 25-50%; 4, 50-75%; 5, 75-100%;

[0229] Inflammation

[0230] 1=minimal in mesentery and muscle or lesion

[0231] 2=mild in mesentery and muscle or lesion

[0232] 3=moderate in mesentery and muscle or lesion

[0233] 4=marked in lesion

[0234] 5=severe in lesion

[0235] The scores for each of the five sections are averaged for necrosis and for inflammation.

[0236] REL-A Protein Levels for Patient Screening and as a Potential Endpoint

[0237] Because elevated REL-A levels can be detected in cancers, cancer patients can be pre-screened for elevated REL-A prior to admission to initial clinical trials testing an anti-REL-A nucleic acid. Initial REL-A levels can be determined (by ELISA) from tumor biopsies or resected tumor samples. During clinical trials, it may be possible to monitor circulating REL-A protein by ELISA. Evaluation of serial blood/serum samples over the course of the anti-REL-A nucleic acid treatment period could be useful in determining early indications of efficacy.

### Example 7

### Activity of Nucleic Acid Molecules used to Down-regulate REL-A Gene Expression

[0238] Applicant has designed and synthesized several nucleic acid molecules targeted against REL-A RNA. These nucleic acid molecules can be tested in cell proliferation and RNA reduction assays described herein.

[0239] Proliferation Assay

[0240] The model proliferation assay used in the study requires a cell-plating density of 2,000-10,000 cells/well in 96-well plates and at least 2 cell doublings over a 5-day treatment period. Cells used in proliferation studies were either lung or ovarian cancer cells (A549 and SKOV-3 cells respectively). To calculate cell density for proliferation assays, the FIPS (fluoro-imaging processing system) method known in the art was used. This method allows for cell density measurements after nucleic acids are stained with CyQuant® dye, and has the advantage of accurately measuring cell densities over a very wide range 1,000-100,000 cells/well in 96-well format. Enzymatic nucleic acid molecules (50-200 nM) are delivered in the presence of cationic lipid at 2.5-5.0 μg/mL and inhibition of proliferation was determined on day 5 post-treatment.

[0241] RNA Assay

[0242] RNA is harvested 24 hours post-treatment using the Qiagen RNeasy® 96 procedure. Real time RT-PCR (TaqMan® assay) is performed on purified RNA samples using separate primer/probe sets specific for target REL-A RNA.

[0243] Indications

[0244] Particular degenerative and disease states that can be associated with REL-A expression modulation include but are not limited to cancerous and/or inflammatory diseases and conditions such as breast, lung, prostate, colorectal, brain, esophageal, bladder, pancreatic, cervical, head and neck, and ovarian cancer, melanoma, lymphoma, glioma, multidrug resistant cancers, rheumatoid arthritis, restenosis, asthma, Crohn's disease, diabetes, obesity, autoimmune disease, lupus, multiple sclerosis, transplant/graft rejection, gene therapy applications, ischemia/reperfusion injury (CNS and myocardial), glomerulonephritis, sepsis, allergic airway inflammation, inflammatory bowel disease, infection, and any other diseases or conditions that are related to or respond to the levels of REL-A in a cell or tissue. The present body of knowledge in REL-A research indicates the need for methods to assay REL-A activity and for compounds that can regulate REL-A expression for research, diagnostic, and therapeutic use.

[0245] The use of monoclonal antibodies, chemotherapy, radiation therapy, analgesics, and/or anti-inflammatory compounds, are all non-limiting examples of a methods that can be combined with or used in conjunction with the nucleic acid molecules (e.g. ribozymes and antisense molecules) of the instant invention. Common chemotherapies that can be combined with nucleic acid molecules of the instant invention include various combinations of cytotoxic drugs to kill cancer cells. These drugs include but are not limited to paclitaxel (Taxol), docetaxel, cisplatin, methotrexate, cyclophosphamide, doxorubin, fluorouracil carboplatin, edatrexate, gemcitabine, vinorelbine etc. Those skilled in the art will recognize that other drug compounds and therapies can be similarly be readily combined with the nucleic acid molecules of the instant invention (e.g. ribozymes and antisense molecules) are hence within the scope of the instant invention.

[0246] Diagnostic Uses

[0247] The nucleic acid molecules of this invention (e.g., enzymatic nucleic acid molecules) can be used as diagnostic tools to examine genetic drift and mutations within diseased cells or to detect the presence of REL-A RNA in a cell. The close relationship between enzymatic nucleic acid molecule activity and the structure of the target RNA allows the detection of mutations in any region of the molecule which alters the base-pairing and three-dimensional structure of the target RNA. By using multiple enzymatic nucleic acid molecules described in this invention, one can map nucleotide changes which are important to RNA structure and function in vitro, as well as in cells and tissues. Cleavage of target RNAs with enzymatic nucleic acid molecules can be used to inhibit gene expression and define the role (essentially) of specified gene products in the progression of disease. In this manner, other genetic targets can be defined as important mediators of the disease. These experiments can lead to better treatment of the disease progression by affording the possibility of combinational therapies (e.g., multiple enzymatic nucleic acid molecules targeted to different genes, enzymatic nucleic acid molecules coupled with known small molecule inhibitors, or intermittent treatment with combinations of enzymatic nucleic acid molecules and/or other chemical or biological molecules). Other in vitro uses of enzymatic nucleic acid molecules of this invention are well known in the art, and include detection of the presence of mRNAs associated with REL-A-related condition. Such RNA is detected by determining the presence of a cleavage product after treatment with an enzymatic nucleic acid molecule using standard methodology.

[0248] In a specific example, enzymatic nucleic acid molecules which cleave only wild-type or mutant forms of the target RNA are used for the assay. The first enzymatic nucleic acid molecule is used to identify wild-type RNA present in the sample and the second enzymatic nucleic acid molecule is used to identify mutant RNA in the sample. As reaction controls, synthetic substrates of both wild-type and mutant RNA are cleaved by both enzymatic nucleic acid molecules to demonstrate the relative enzymatic nucleic acid molecule efficiencies in the reactions and the absence of cleavage of the “non-targeted” RNA species. The cleavage products from the synthetic substrates also serve to generate size markers for the analysis of wild-type and mutant RNAs in the sample population. Thus each analysis requires two enzymatic nucleic acid molecules, two substrates and one unknown sample which is combined into six reactions. The presence of cleavage products is determined using an RNAse protection assay so that full-length and cleavage fragments of each RNA can be analyzed in one lane of a polyacrylamide gel. It is not absolutely required to quantify the results to gain insight into the expression of mutant RNAs and putative risk of the desired phenotypic changes in target cells. The expression of mRNA whose protein product is implicated in the development of the phenotype (i.e., REL-A) is adequate to establish risk. If probes of comparable specific activity are used for both transcripts, then a qualitative comparison of RNA levels will be adequate and will decrease the cost of the initial diagnosis. Higher mutant form to wild-type ratios are correlated with higher risk whether RNA levels are compared qualitatively or quantitatively. The use of enzymatic nucleic acid molecules in diagnostic applications contemplated by the instant invention is more fully described in George et al., U.S. Pat. Nos. 5,834,186 and 5,741,679, Shih et al., U.S. Pat. No. 5,589,332, Nathan et al., U.S. Pat. No. 5,871,914, Nathan and Ellington, International PCT publication No. WO 00/24931, Breaker et al., International PCT Publication Nos. WO 00/26226 and 98/27104, and Sullenger et al., International PCT publication No. WO 99/29842.

[0249] Additional Uses

[0250] Potential uses of sequence-specific enzymatic nucleic acid molecules of the instant invention can have many of the same applications for the study of RNA that DNA restriction endonucleases have for the study of DNA (Nathans et al., 1975 Ann. Rev. Biochem. 44:273). For example, the pattern of restriction fragments can be used to establish sequence relationships between two related RNAs, and large RNAs can be specifically cleaved to fragments of a size more useful for study. The ability to engineer sequence specificity of the enzymatic nucleic acid molecule is ideal for cleavage of RNAs of unknown sequence. Applicant has described the use of nucleic acid molecules to down-regulate gene expression of target genes in bacterial, microbial, fungal, viral, and eukaryotic systems including plant, or mammalian cells.

[0251] All patents and publications mentioned in the specification are indicative of the levels of skill of those skilled in the art to which the invention pertains. All references cited in this disclosure are incorporated by reference to the same extent as if each reference had been incorporated by reference in its entirety individually.

[0252] One skilled in the art would readily appreciate that the present invention is well adapted to carry out the objects and obtain the ends and advantages mentioned, as well as those inherent therein. The methods and compositions described herein as presently representative of preferred embodiments are exemplary and are not intended as limitations on the scope of the invention. Changes therein and other uses will occur to those skilled in the art, which are encompassed within the spirit of the invention, are defined by the scope of the claims.

[0253] It will be readily apparent to one skilled in the art that varying substitutions and modifications can be made to the invention disclosed herein without departing from the scope and spirit of the invention. Thus, such additional embodiments are within the scope of the present invention and the following claims.

[0254] The invention illustratively described herein suitably can be practiced in the absence of any element or elements, limitation or limitations which is not specifically disclosed herein. Thus, for example, in each instance herein any of the terms “comprising”, “consisting essentially of” and “consisting of” may be replaced with either of the other two terms. The terms and expressions which have been employed are used as terms of description and not of limitation, and there is no intention that in the use of such terms and expressions of excluding any equivalents of the features shown and described or portions thereof, but it is recognized that various modifications are possible within the scope of the invention claimed. Thus, it should be understood that although the present invention has been specifically disclosed by preferred embodiments, optional features, modification and variation of the concepts herein disclosed may be resorted to by those skilled in the art, and that such modifications and variations are considered to be within the scope of this invention as defined by the description and the appended claims.

[0255] In addition, where features or aspects of the invention are described in terms of Markush groups or other grouping of alternatives, those skilled in the art will recognize that the invention is also thereby described in terms of any individual member or subgroup of members of the Markush group or other group.

[0256] Other embodiment are within the claims that follow.

TABLE I
Characteristics of naturally occurring ribozymes

Group I Introns
Size: ˜150 to >1000 nucleotides.
Requires a U in the target sequence immediately 5′ of the cleavage site.
Binds 4-6 nucleotides at the 5-side of the cleavage site.
Reaction mechanism: attack by the 3′-OH of guanosine to generate
cleavage products with 3′-OH and 5′-guanosine.
Additional protein cofactors required in some cases to help folding and
maintenance of the active structure.
Over 300 known members of this class. Found as an intervening sequence
in Tetrahymena thermophila rRNA, fungal mitochondria, chloroplasts,
phage T4, blue-green algae, and others.
Major structural features largely established through phylogenetic
comparisons, mutagenesis, and biochemical studies [^{i,ii}].
Complete kinetic framework established for one ribozyme [^{iii,iv,v,vi}].
Studies of ribozyme folding and substrate docking underway [^{vii,viii,ix}].
Chemical modification investigation of important residues well established
[^{x,xi}].
The small (4-6 nt) binding site may make this ribozyme too non-specific
for targeted RNA cleavage, however, the Tetrahymena group I intron has
been used to repair a “defective” β-galactosidase message by the
ligation of new galactosidase sequences onto the defective message [^{xii}].
RNAse P RNA (M1 RNA)
Size: ˜290 to 400 nucleotides.
RNA portion of a ubiquitous ribonucleoprotein enzyme.
Cleaves tRNA precursors to form mature tRNA [^{xiii}].
Reaction mechanism: possible attack by M²⁺ -OH to generate cleavage
products with 3′-OH and 5′-phosphate.
RNAse P is found throughout the prokaryotes and eukaryotes. The RNA
subunit has been sequenced from bacteria, yeast, rodents, and primates.
Recruitment of endogenous RNAse P for therapeutic applications is
possible through hybridization of an External Guide Sequence (EGS)
to the target RNA [^{xiv,xv}]
Important phosphate and 2′ OH contacts recently identified [^{xvi,xvii}]
Group II Introns
Size: >1000 nucleotides.
Trans cleavage of target RNAs recently demonstrated [^{xviii,xix}].
Sequence requirements not fully determined.
Reaction mechanism: 2′-OH of an internal adenosine generates cleavage
products with 3′-OH and a “lariat” RNA containing a 3′-5′ and a
2′-5′ branch point.
Only natural ribozyme with demonstrated participation in DNA cleavage
[^{xx,xxi}] in addition to RNA cleavage and ligation.
Major structural features largely established through phylogenetic
comparisons [^{xxii}].
Important 2′ OH contacts beginning to be identified [^{xxiii}]
Kinetic framework under development [^{xxiv}]
Neurospora VS RNA
Size: ˜144 nucleotides.
Trans cleavage of hairpin target RNAs recently demonstrated [^{xxv}].
Sequence requirements not fully determined.
Reaction mechanism: attack by 2′-OH 5′ to the scissile bond to
generate cleavage products with 2′,3′-cyclic phosphate and 5′-OH ends.
Binding sites and structural requirements not fully determined.
Only 1 known member of this class. Found in Neurospora VS RNA.
Hammerhead Ribozyme
(see text for references)
Size: ˜13 to 40 nucleotides.
Requires the target sequence UH immediately 5′ of the cleavage site.
Binds a variable number nucleotides on both sides of the cleavage site.
Reaction mechanism: attack by 2′-OH 5′ to the scissile bond to
generate cleavage products with 2′,3′-cyclic phosphate and 5′-OH ends.
14 known members of this class. Found in a number of plant pathogens
(virusoids) that use RNA as the infectious agent.
Essential structural features largely defined, including 2 crystal structures
[^{xxvi,xxvii}]
Minimal ligation activity demonstrated (for engineering through in vitro
selection) [^{xxviii}]
Complete kinetic framework established for two or more ribozymes [^{xxix}].
Chemical modification investigation of important residues well established
[^{xxx}].
Hairpin Ribozyme
Size: ˜50 nucleotides.
Requires the target sequence GUC immediately 3′ of the cleavage site.
Binds 4-6 nucleotides at the 5-side of the cleavage site and a variable
number to the 3′-side of the cleavage site.
Reaction mechanism: attack by 2′-OH 5′ to the scissile bond to generate
cleavage products with 2′,3′-cyclic phosphate and 5′-OH ends.
3 known members of this class. Found in three plant pathogen (satellite
RNAs of the tobacco ringspot virus, arabis mosaic virus and chicory
yellow mottle virus) which uses RNA as the infectious agent.
Essential structural features largely defined [^{xxxi,xxxii,xxxiii,xxxiv}]
Ligation activity (in addition to cleavage activity) makes ribozyme
amenable to engineering through in vitro selection [^{xxxv}]
Complete kinetic framework established for one ribozyme [^{xxxvi}].
Chemical modification investigation of important residues begun
[^{xxxvii,xxxviii}].
Hepatitis Delta Virus (HDV) Ribozyme
Size: ˜60 nucleotides.
Trans cleavage of target RNAs demonstrated [^{xxxix}].
Binding sites and structural requirements not fully determined, although no
sequences 5′ of cleavage site are required. Folded ribozyme contains a
pseudoknot structure [^{xl}]
Reaction mechanism: attack by 2′-OH 5′ to the scissile bond to generate
cleavage products with 2′,3′-cyclic phosphate and 5′-OH ends.
Only 2 known members of this class. Found in human HDV.
Circular form of HDV is active and shows increased nuclease stability [^{xli}]
[ⁱ], Michel, Francois; Westhof, Eric. Slippery substrates. Nat. Struct. Biol. (1994), 1(1), 5-7.
[ⁱⁱ], Lisacek, Frederique; Diaz, Yolande; Michel, Francois. Automatic identification of group I intron cores in genomic DNA sequences. J. Mol. Biol. (1994), 235(4), 1206-17.
[ⁱⁱⁱ], Herschlag, Daniel; Cech, Thomas R.. Catalysis of RNA cleavage by the Tetrahymena thermophila ribozyme. 1. Kinetic description of the reaction of an RNA substrate complementary to the active site. Biochemistry (1990), 29(44), 10159-71.
[^{iv}], Herschlag, Daniel; Cech, Thomas R.. Catalysis of RNA cleavage by the Tetrahymena thermophila ribozyme. 2. Kinetic description of the reaction of an RNA substrate that forms a mismatch at the active site. Biochemistry (1990), 29(44), 10172-80.
[^{v}], Knitt, Deborah S.; Herschlag, Daniel. pH Dependencies of the Tetrahymena Ribozyme Reveal an Unconventional Origin of an Apparent pKa. Biochemistry (1996), 35(5), 1560-70.
[^{vi}], Bevilacqua, Philip C.; Sugimoto, Naoki; Turner, Douglas H.. A mechanistic framework for the second step of splicing catalyzed by the Tetrahymena ribozyme. Biochemistry (1996), 35(2), 648-58.
[^{vii}], Li, Yi; Bevilacqua, Philip C.; Mathews, David; Turner, Douglas H.. Thermodynamic and activation parameters for binding of a pyrene-labeled substrate by the Tetrahymena ribozyme: docking is not diffusion-controlled and is driven by a favorable entropy change. Biochemistry (1995), 34(44), 14394-9.
[^{viii}], Banerjee, Aloke Raj; Turner, Douglas H.. The time dependence of chemical modification reveals slow steps in the folding of a group I ribozyme. Biochemistry (1995), 34(19), 6504-12.
[^{ix}], Zarrinkar, Patrick P.; Williamson, James R.. The P9.1-P9.2 peripheral extension helps guide folding of the Tetrahymena ribozyme. Nucleic Acids Res. (1996), 24(5), 854-8.
[^{x}], Strobel, Scott A.; Cech, Thomas R.. Minor groove recognition of the conserved G.cntdot.U pair at the Tetrahymena ribozyme reaction site. Science (Washington, D. C.) (1995), 267(5198), 675-9.
[^{xi}], Strobel, Scott A.; Cech, Thomas R.. Exocydic Amine of the Conserved G.cntdot.U Pair at the Cleavage Site of the Tetrahymena Ribozyme Contributes to 5′-Splice Site Selection and Transition State Stabilization. Biochemistry (1996), 35(4), 1201-11.
[^{xii}], Sullenger, Bruce A.; Cech, Thomas R.. Ribozyme-mediated repair of defective mRNA by targeted trans-splicing. Nature (London) (1994), 371(6498), 619-22.
[^{xiii}], Robertson, H. D.; Altman, S.; Smith, J. D. J. Biol. Chem., 247, 5243-5251 (1972).
[^{xiv}], Forster, Anthony C.; Altman, Sidney. External guide sequences for an RNA enzyme. Science (Washington, D. C., 1883-) (1990), 249(4970), 783-6.
[^{xv}], Yuan, Y.; Hwang, E. S.; Altman, S. Targeted cleavage of mRNA by human RNase P. Proc. Natl. Acad. Sci. USA (1992) 89, 8006-10.
[^{xvi}], Harris, Michael E.; Pace, Norman R.. Identification of phosphates involved in catalysis by the ribozyme RNase P RNA. RNA (1995), 1(2), 210-18.
[^{xvii}], Pan, Tao; Loria, Andrew; Zhong, Kun. Probing of tertiary interactions in RNA: 2-hydroxyl-base contacts between the RNase P RNA and pre-tRNA. Proc. Natl. Acad. Sci. U.S.A. (1995), 92(26), 12510-14.
[^{xviii}], Pyle, Anna Marie; Green, Justin B.. Building a Kinetic Framework for Group II Intron Ribozyme Activity: Quantitation of Interdomain Binding and Reaction Rate. Biochemistry (1994), 33(9), 2716-25.
[^{xix}], Michels, William J. Jr.; Pyle, Anna Marie. Conversion of a Group II Intron into a New Multiple-Turnover Ribozyme that Selectively Cleaves Oligonucleotides: Elucidation of Reaction Mechanism and Structure/Function Relationships. Biochemistry (1995), 34(9), 296-77.
[^{xx}], Zimmerly, Steven; Guo, Huatao; Eskes, Robert; Yang, Jian; Perlman, Philip S.; Lambowitz, Alan M.. A group II intron RNA is a catalytic component of a DNA endonuclease involved in intron mobility. Cell (Cambridge, Mass.) (1995), 83(4), 529-38.
[^{xxi}], Griffin, Edmund A., Jr.; Qin, Zhifeng; Michels, Williams J., Jr.; Pyle, Anna Marie. Group II intron ribozymes that cleave DNA and RNA linkages with similar efficiency, and lack contacts with substrate 2′-hydroxyl groups. Chem. Biol. (1995), 2(11), 761-70.
[^{xxii}], Michel, Francois; Ferat, Jean Luc. Structure and activities of group II introns. Annu. Rev. Biochem. (1995), 64, 435-61.
[^{xxiii}], Abramovitz, Dana L.; Friedman, Richard A.; Pyle, Anna Marie. Catalytic role of 2′-hydroxyl groups within a group II intron active site. Science (Washington, D. C.) (1996), 271(5254), 1410-13.
[^{xxiv}], Daniels, Danette L.; Michels, William J., Jr.; Pyle, Anna Marie. Two competing pathways for self-splicing by group II introns: a quantitative analysis of in vitro reaction rates and products. J. Mol. Biol. (1996), 256(1), 31-49.
[^{xxv}], Guo, Hans C. T.; Collins, Richard A.. Efficient trans-cleavage of a stem-loop RNA substrate by a ribozyme derived from Neurospora VS RNA. EMBO J. (1995), 14(2), 368-76.
[^{xxvi}], Scott, W. G., Finch, J. T., Aaron, K. The crystal structure of an all RNA hammerhead ribozyme: A proposed mechanism for RNA catalytic cleavage. Cell, (1995), 81, 991-1002.
[^{xxvii}], McKay, Structure and function of the hammerhead ribozyme: an unfinished story. RNA, (1996), 2, 395-403.
[^{xxviii}], Long, D., Uhlenbeck, O., Hertel, K. Ligation with hammerhead ribozymes. U.S. Pat. No. 5,633,133.
[^{xxix}], Hertel, K. J., Herschlag, D., Uhlenbeck, O. A kinetic and thermodynamic framework for the hammerhead ribozyme reaction. Biochemistry, (1994) 33, 3374-3385. Beigelman, L., et al., Chemical modifications of hammerhead ribozymes. J. Biol. Chem., (1995) 270, 25702-25708.
[^{xxx}], Beigelman, L., et al, Chemical modifications of hammerhead ribozymes. J. Biol. Chem., (1995) 270, 25702-25708.
[^{xxxi}], Hampel, Arnold; Tritz, Richard; Hicks, Margaret; Cruz, Philip. ′Hairpin′ catalytic RNA model: evidence for helixes and sequence requirement for substrate RNA. Nucleic Acids Res. (1990), 18(2), 299-304.
[^{xxxii}], Chowrira, Bharat M.; Berzal-Herranz, Alfredo; Burke, John M.. Novel guanosine requirement for catalysis by the hairpin ribozyme. Nature (London) (1991), 354(6351), 320-2.
[^{xxxiii}], Berzal-Herranz, Alfredo; Joseph, Simpson; Chowrira, Bharat M.; Butcher, Samuel E.; Burke, John M.. Essential nucleotide sequences and secondary structure elements of the hairpin ribozyme. EMBO J.(1993), 12(6), 2567-73.
[^{xxxiv}], Joseph, Simpson; Berzal-Herranz, Alfredo; Chowrira, Bharat M.; Butcher, Samuel E.. Substrate selection rules for the hairpin ribozyme determined by in vitro selection, mutation, and analysis of mismatched substrates. Genes Dev. (1993), 7(1), 130-8.
[^{xxxv}], Berzal-Herranz, Alfredo; Joseph, Simpson; Burke, John M.. In vitro selection of active hairpin ribozymes by sequential RNA-catalyzed cleavage and ligation reactions. Genes Dev. (1992), 6(1), 129-34.
[^{xxxvi}], Hegg, Lisa A.; Fedor, Martha J.. Kinetics and Thermodynamics of Intermolecular Catalysis by Hairpin Ribozymes. Biochemistry (1995), 34(48), 15813-28.
[^{xxxvii}], Grasby, Jane A.; Mersmann, Karin; Singh, Mohinder; Gait, Michael I.. Purine Functional Groups in Essential Residues of the Hairpin Ribozyme Required for Catalytic Cleavage of RNA. Biochemistry (1995), 34(12), 4068-76.
[^{xxxviii}], Schmidt, Sabine; Beigelman, Leonid; Karpeisky, Alexander; Usman, Nassim; Sorensen, Ulrik S.; Gait, Michael J.. Base and sugar requirements for RNA cleavage of essential nucleoside residues in internal loop B of the hairpin ribozyme: implications for secondary structure. Nucleic Acids Res. (1996), 24(4), 573-81.
[^{xxxix}], Perrotta, Anne T.; Been, Michael D.. Cleavage of oligoribonucleotides by a ribozyme derived from the hepatitis .delta. virus RNA sequence. Biochemistry (1992), 31(1), 16-21.
[^{xl}], Perrotta, Anne T.; Been, Michael D.. A pseudoknot-like structure required for efficient self-cleavage of hepatitis delta virus RNA. Nature (London) (1991), 350(6317), 434-6.
[^{xli}], Puttaraju, M.; Perrotta, Anne T.; Been, Michael D.. A circular trans-acting hepatitis delta virus ribozyme. Nucleic Acids Res. (1993), 21(18), 4253-8.

[0257] TABLE II
A. 2.5 μmol Synthesis Cycle ABI 394 Instrument

| | | | | | |
|---|---|---|---|---|---|
| Reagent | Equivalents | Amount | Wait Time* DNA | Wait Time* 2′-O-methyl | Wait Time*RNA |

| | | | | | | | | |
|---|---|---|---|---|---|---|---|---|
| Phosphoramidites | 6.5 | 163 | μL | 45 sec | 2.5 | min | 7.5 | min |
| S-Ethyl Tetrazole | 23.8 | 238 | μL | 45 sec | 2.5 | min | 7.5 | min |
| Acetic Anhydride | 100 | 233 | μL | 5 sec | 5 | sec | 5 | sec |
| N-Methyl | 186 | 233 | μL | 5 sec | 5 | sec | 5 | sec |
| Imidazole | | | | | | | | |
| TCA | 176 | 2.3 | mL | 21 sec | 21 | sec | 21 | sec |
| Iodine | 11.2 | 1.7 | mL | 45 sec | 45 | sec | 45 | sec |
| Beaucage | 12.9 | 645 | μL | 100 sec | 300 | sec | 300 | sec |

| | | | | | | |
|---|---|---|---|---|---|---|
| Acetonitrile | NA | 6.67 | mL | NA | NA | NA |

B. 0.2 μmol Synthesis Cycle ABI 394 Instrument

| | | | | | |
|---|---|---|---|---|---|
| Reagent | Equivalents | Amount | Wait Time* DNA | Wait Time* 2′-O-methyl | Wait Time*RNA |

| | | | | | | | |
|---|---|---|---|---|---|---|---|
| Phosphoramidites | 15 | 31 | μL | 45 sec | 233 | sec | 465 sec |
| S-Ethyl Tetrazole | 38.7 | 31 | μL | 45 sec | 233 | min | 465 sec |
| Acetic Anhydride | 655 | 124 | μL | 5 sec | 5 | sec | 5 sec |
| N-Methyl | 1245 | 124 | μL | 5 sec | 5 | sec | 5 sec |
| Imidazole | | | | | | | |
| TCA | 700 | 732 | μL | 10 sec | 10 | sec | 10 sec |
| Iodine | 20.6 | 244 | μL | 15 sec | 15 | sec | 15 sec |
| Beaucage | 7.7 | 232 | μL | 100 sec | 300 | sec | 300 sec |

| | | | | | | |
|---|---|---|---|---|---|---|
| Acetonitrile | NA | 2.64 | mL | NA | NA | NA |

C. 0.2 μmol Synthesis Cycle 96 well Instrument

| | | | | | |
|---|---|---|---|---|---|
| | Equivalents: | | | | |
| | DNA/2′-O- | Amount: DNA/2′-O- | | Wait Time* 2′-O- | |
| Reagent | methyl/Ribo | methyl/Ribo | Wait Time* DNA | methyl | Wait Time* Ribo |

| | | | | | | | |
|---|---|---|---|---|---|---|---|
| Phosphoramidites | 22/33/66 | 40/60/120 | μL | 60 sec | 180 | sec | 360 sec |
| S-Ethyl Tetrazole | 70/105/210 | 40/60/120 | μL | 60 sec | 180 | min | 360 sec |
| Acetic Anhydride | 265/265/265 | 50/50/50 | μL | 10 sec | 10 | sec | 10 sec |
| N-Methyl | 502/502/502 | 50/50/50 | μL | 10 sec | 10 | sec | 10 sec |
| Imidazole | | | | | | | |
| TCA | 238/475/475 | 250/500/500 | μL | 15 sec | 15 | sec | 15 sec |
| Iodine | 6.8/6.8/6.8 | 80/80/80 | μL | 30 sec | 30 | sec | 30 sec |
| Beaucage | 34/51/51 | 80/120/120 | | 100 sec | 200 | sec | 200 sec |
| Acetonitrile | NA | 1150/1150/1150 | μL | NA | NA | | NA |

*Wait time does not include contact time during delivery.

[0258] TABLE III
Human REL-A Inozyme and Substrate Sequence

| | | Seq | | Seq |
|---|---|---|---|---|
| Pos | Substrate | ID | Inozyme | ID |
| 16 | GGCGGGGC C GGGUCGCA | 1 | UGCGACCC CUGAUGAGGCCGUUAGGCCGAA ICCCCGCC | 711 |
| 24 | CGGGUCGC A GCUGGGCC | 2 | GGCCCAGC CUGAUGAGGCCGUUAGGCCGAA ICCACCCG | 712 |
| 27 | GUCCCAGC U GGGCCCGC | 3 | GCGGGCCC CUGAUGAGGCCGUUAGGCCGAA ICUGCGAC | 713 |
| 32 | AGCUGGGC C CGCGGCAU | 4 | AUGCCGCG CUGAUGAGGCCGUUAGGCCGAA ICCCAGCU | 714 |
| 33 | GCUGGGCC C GCGGCAUG | 5 | CAUGCCGC CUGAUGAGGCCGUUAGGCCGAA IGCCCAGC | 715 |
| 39 | CCCGCGGC A UGGACGAA | 6 | UUCGUCCA CUGAUGAGGCCGUUAGGCCGAA ICCGCGGG | 716 |
| 49 | GGACGAAC U GUUCCCCC | 7 | GGGGGAAC CUGAUGAGGCCGUUAGGCCGAA IUUCGUCC | 717 |
| 54 | AACUGUUC C CCCUCAUC | 8 | GAUGAGGG CUGAUGAGGCCGUUAGGCCGAA IAACAGUU | 718 |
| 55 | ACUGUUCC C CCUCAUCU | 9 | AGAUGAGG CUGAUGAGGCCGUUAGGCCGAA IGAACAGU | 719 |
| 56 | CUGUUCCC C CUCAUCUU | 10 | AAGAUGAG CUGAUGAGGCCGUUAGGCCGAA IGGAACAG | 720 |
| 57 | UGUUCCCC C UCAUCUUC | 11 | GAAGAUGA CUGAUGAGGCCGUUAGGCCGAA IGGGAACA | 721 |
| 58 | GUUCCCCC U CAUCUUCC | 12 | GGAAGAUG CUGAUGAGGCCGUUAGGCCGAA IGGGGAAC | 722 |
| 60 | UCCCCCUC A UCUUCCCG | 13 | CCGGAAGA CUGAUGAGGCCGUUAGGCCGAA IAGGGGGA | 723 |
| 63 | COCUCAUC U UCCCGCCA | 14 | UGCCGGGA CUGAUGAGGCCGUUAGGCCGAA IAUGAGGG | 724 |
| 66 | UCAUCUUC C CGGCAGAG | 15 | CUCUGCCG CUGAUGAGGCCGUUAGGCCGAA IAAGAUGA | 725 |
| 67 | CAUCUUCC C GGCAGAGC | 16 | GCUCUGCC CUGAUGAGGCCGUUAGGCCGAA IGAAGAUG | 726 |
| 71 | UUCCCGGC A GAGCAGCC | 17 | GGCUGCUC CUGAUGAGGCCGUUAGGCCGAA ICCGGGAA | 727 |
| 76 | GGCAGAGC A GCCCAAGC | 18 | GCUUGGGC CUGAUGAGGCCGUUAGGCCGAA ICUCUGCC | 728 |
| 79 | AGAGCAGC C CAAGCAGC | 19 | GCUGCUUG CUGAUGAGGCCGUUAGGCCGAA ICUGCUCU | 729 |
| 80 | GAGCAGCC C AAGCAGCG | 20 | CGCUGCUU CUGAUGAGGCCGUUAGGCCGAA IGCUGCUC | 730 |
| 81 | AGCAGCCC A AGCAGCGG | 21 | CCGCUGCU CUGAUGAGGCCGUUAGGCCGAA IGGCUGCU | 731 |
| 85 | GCCCAAGC A GCGGGGCA | 22 | UGCCCCGC CUGAUGAGGCCGUUAGGCCGAA ICUUGGGC | 732 |
| 93 | AGCGGGGC A UGCGCUUC | 23 | GAAGCGCA CUGAUGAGGCCGUUAGGCCGAA ICCCCGCU | 733 |
| 99 | GCAUGCGC U UCCGCUAC | 24 | GUAGCGGA CUGAUGAGGCCGUUAGGCCGAA ICGCAUGC | 734 |
| 102 | UGCGCUUC C GCUACAAG | 25 | CUUGUAGC CUGAUGAGGCCGUUAGGCCGAA IAAGCGCA | 735 |
| 105 | GCUUCCGC U ACAAGUGC | 26 | GCACUUGU CUGAUGAGGCCGUUAGGCCGAA ICGGAAGC | 736 |
| 108 | UCCGCUAC A AGUGCGAG | 27 | CUCGCACU CUGAUGAGGCCGUUAGGCCGAA IUAGCGGA | 737 |
| 123 | AGGGGCGC U CCGCGGGC | 28 | GCCCGCGG CUGAUGAGGCCGUUAGGCCGAA ICGCCCCU | 738 |
| 125 | GGGCGCUC C GCGGGCAG | 29 | CUGCCCGC CUGAUGAGGCCGUUAGGCCGAA IAGCGCCC | 739 |
| 132 | CCCCGGGC A GCAUCCCA | 30 | UGGGAUGC CUGAUGAGGCCGUUAGGCCGAA ICCCGCGG | 740 |
| 135 | CGGGCAGC A UCCCAGGC | 31 | GCCUGGGA CUGAUGAGGCCGUUAGGCCGAA ICUGCCCG | 741 |
| 138 | GCAGCAUC C CAGGCGAG | 32 | CUCGCCUG CUGAUGAGGCCGUUAGGCCGAA IAUGCUGC | 742 |
| 139 | CAGCAUCC C AGGCGAGA | 33 | UCUCGCCU CUGAUGAGGCCGUUAGGCCGAA IGAUGCUG | 743 |
| 140 | AGCAUCCC A GGCGAGAG | 34 | CUCUCGCC CUGAUGAGGCCGUUAGGCCGAA IGGAUGCU | 744 |
| 153 | AGAGGAGC A CAGAUACC | 35 | GGUAUCUG CUGAUGAGGCCGUUAGGCCGAA ICUCCUCU | 745 |
| 155 | AGGAGCAC A GAUACCAC | 36 | GUGGUAUC CUGAUGAGGCCGUUAGGCCGAA IUGCUCCU | 746 |
| 161 | ACAGAUAC C ACCAAGAC | 37 | GUCUUGGU CUGAUGAGGCCGUUAGGCCGAA IUAUCUGU | 747 |
| 162 | CAGAUACC A CCAAGACC | 38 | GGUCUUGG CUGAUCAGGCCGUUAGGCCGAA IGUAUCUG | 748 |
| 164 | GAUACCAC C AAGACCCA | 39 | UGCCUCUU CUGAUGAGGCCGUUAGGCCGAA IUGGUAUC | 749 |
| 165 | AUACCACC A AGACCCAC | 40 | GUGGGUCU CUGAUGAGGCCGUUAGGCCGAA IGUGGUAU | 750 |
| 170 | ACCAAGAC C CACCCCAC | 41 | GUGGGGUG CUGAUGAGGCCGUUAGGCCGAA IUCUUGGU | 751 |
| 171 | CCAAGACC C ACCCCACC | 42 | GGUGGGGU CUGAUGAGGCCGUUAGGCCGAA ICUCUUGG | 752 |
| 172 | CAAGACCC A CCCCACCA | 43 | UGGUGGGG CUGAUGAGGCCGUUAGGCCGAA IGGUCUUG | 753 |
| 174 | AGACCCAC C CCACCAUC | 44 | GAUGGUGG CUGAUGAGGCCGUUAGGCCGAA IUGGGUCU | 754 |
| 175 | GACCCACC C CACCAUCA | 45 | UGAUGGUG CUGAUGAGGCCGUUAGGCCGAA IGUGGGUC | 755 |
| 176 | ACCCACCC C ACCAUCAA | 46 | UUGAUGGU CUGAUGAGGCCGUUAGGCCGAA IGGUGGGU | 756 |
| 177 | CCCACCCC A CCAUCAAG | 47 | CUUGAUGG CUGAUGAGGCCGUUAGGCCGAA IGGGUGGG | 757 |
| 179 | CACCCCAC C AUCAAGAU | 48 | AUCUUGAU CUGAUGAGGCCGUUAGGCCGAA IUGGGGUG | 758 |
| 180 | ACCCCACC A UCAAGAUC | 49 | GAUCUUGA CUGAUGAGGCCGUUAGGCCGAA IGUGCGGU | 759 |
| 183 | CCACCAUC A AGAUCAAU | 50 | AUUGAUCU CUGAUGAGGCCGUUAGGCCGAA IAUGGUGG | 760 |
| 189 | UCAAGAUC A AUGGCUAC | 51 | GUAGCCAU CUGAUGAGGCCGUUAGGCCGAA IAUCUUGA | 761 |
| 195 | UCAAUGGC U ACACAGGA | 52 | UCCUGUGU CUGAUGAGGCCGUUAGGCCGAA ICCAUUGA | 762 |
| 198 | AUGGCUAC A CAGGACCA | 53 | UGGUCCUG CUGAUGAGGCCGUUAGGCCGAA IUAGCCAU | 763 |
| 200 | GGCUACAC A GGACCAGG | 54 | CCUGGUCC CUGAUGAGGCCGUUAGGCCGAA IUGUAGCC | 764 |
| 205 | CACAGGAC C AGGGACAG | 55 | CUGUCCCU CUGAUGAGGCCGUUAGGCCGAA IUCCUGUG | 765 |
| 206 | ACAGGACC A GGGACAGU | 56 | ACUGUCCC CUGAUGAGGCCGUUAGGCCGAA IGUCCUGU | 766 |
| 212 | CCAGGGAC A GUGCGCAU | 57 | AUGCGCAC CUGAUGAGGCCGUUAGGCCGAA IUCCCUGG | 767 |
| 219 | CAGUGCGC A UCUCCCUG | 58 | CAGGGAGA CUGAUGAGGCCGUUAGGCCGAA ICGCACUG | 768 |
| 222 | UGCGCAUC U CCCUGGUC | 59 | GACCAGGG CUGAUGAGGCCGUUAGGCCGAA IAUGCGCA | 769 |
| 224 | CGCAUCUC C CUGGUCAC | 60 | GUGACCAG CUGAUGAGGCCGUUAGGCCGAA IAGAUGCG | 770 |
| 225 | GCAUCUCC C UGGUCACC | 61 | GGUGACCA CUGAUGAGGCCGUUAGGCCGAA IGAGAUGC | 771 |
| 226 | CAUCUCCC U GGUCACCA | 62 | UGGUGACC CUGAUGAGGCCGUUAGGCCGAA IGGAGAUG | 772 |
| 231 | CCCUGGUC A CCAAGGAC | 63 | GUCCUUGG CUGAUGAGGCCGUUAGGCCGAA IACCAGGG | 773 |
| 233 | CUGGUCAC C AAGGACCC | 64 | GGGUCCUU CUGAUGAGGCCGUUAGGCCGAA IUGACCAG | 774 |
| 234 | UGGUCACC A AGGACCCU | 65 | AGGGUCCU CUGAUGAGGCCGUUAGGCCGAA IGUGACCA | 775 |
| 240 | CCAAGGAC C CUCCUCAC | 66 | GUGAGGAG CUGAUGAGGCCGUUAGGCCGAA IUCCUUGG | 776 |
| 241 | CAAGGACC C UCCUCACC | 67 | GGUGAGGA CUGAUGAGGCCGUUAGGCCGAA IGUCCUUG | 777 |
| 242 | AAGGACCC U CCUCACCG | 68 | CGGUGAGG CUGAUGAGGCCGUUAGGCCGAA IGGUCCUU | 778 |
| 244 | GGACCCUC C UCACCGGC | 69 | GCCGGUGA CUGAUGAGGCCGUUAGGCCGAA IAGGGUCC | 779 |
| 245 | GACCCUCC U CACCGGCC | 70 | GGCCGGUG CUGAUGAGGCCGUUAGGCCGAA IGAGGGUC | 780 |
| 247 | CCCUCCUC A CCGGCCUC | 71 | GAGGCCGG CUGAUGAGGCCGUUAGGCCGAA IAGGAGGG | 781 |
| 249 | CUCCUCAC C GGCCUCAC | 72 | GUGAGGCC CUGAUGAGGCCGUUAGGCCGAA IUGAGGAG | 782 |
| 253 | UCACCGGC C UCACCCCC | 73 | GGGGGUGA CUGAUGAGGCCGUUAGGCCGAA ICCUGUGA | 783 |
| 254 | CACCGGCC U CACCCCCA | 74 | UGGGGGUG CUGAUGAGGCCGUUAGGCCGAA IGOOGGUG | 784 |
| 256 | CCGGCCUC A CCCCCACG | 75 | CGUGGGGG CUGAUGAGGCCGUUAGGCCGAA IAGGCCGG | 785 |
| 258 | GGCCUCAC C CCCACGAG | 76 | CUCGUGGG CUGAUGAGGCCGUUAGGCCGAA IUGAGGCC | 786 |
| 259 | GCCUCACC C CCACGAGC | 77 | GCUCGUGG CUGAUGAGGCCGUUAGGCCGAA IGUGAGGC | 787 |
| 260 | CCUCACCC C CACGAGCU | 78 | AGCUCGUG CUGAUGAGGCCGUUAGGCCGAA IGGUGAGG | 788 |
| 261 | CUCACCCC C ACGAGCUU | 79 | AAGCUCGU CUGAUGAGGCCGUUAGGCCGAA IGGGUGAG | 789 |
| 262 | UCACCCCC A CGAGCUUG | 80 | CAAGCUCG CUGAUGAGGCCGUUAGGCCGAA IGGGGUGA | 790 |
| 268 | CCACGAGC U UGUAGGAA | 81 | UUCCUACA CUGAUGAGGCCGUUAGGCCGAA ICUCGUGG | 791 |
| 282 | GAAAGGAC U GCCGGGAU | 82 | AUCCCGGC CUGAUGAGGCCGUUAGGCCGAA IUCCUUUC | 792 |
| 285 | AGGACUGC C GGGAUGGC | 83 | GCCAUCCC CUGAUGAGGCCGUUAGGCCGAA ICAGUCCU | 793 |
| 294 | GGGAUGGC U UCUAUGAG | 84 | CUCAUAGA CUGAUGAGGCCGUUAGGCCGAA ICCAUCCC | 794 |
| 297 | AUGGCUUC U AUGAGGCU | 85 | AGCCUCAU CUGAUGAGGCCGUUAGGCCGAA IAAGCCAU | 795 |
| 305 | UAUGAGGC U GAGCUCUG | 86 | CAGAGCUC CUGAUGAGGCCGUUAGGCCGAA ICCUCAUA | 796 |
| 310 | GGCUGAGC U CUGCCCGG | 87 | CCGGGCAG CUGAUGAGGCCGUUAGGCCGAA ICUCAGCC | 797 |
| 312 | CUGAGCUC U GCCCGGAC | 88 | GUCCGGGC CUGAUGAGGCCGUUAGGCCGAA IAGCUCAG | 798 |
| 315 | AGCUCUGC C CGGACCGC | 89 | GCGGUCCG CUGAUGAGGCCGUUAGGCCGAA ICAGAGCU | 799 |
| 316 | GCUCUGCC C GGACCGCU | 90 | AGCGGUCC CUGAUGAGGCCGUUAGGCCGAA IGCAGAGC | 800 |
| 321 | GCCCGGAC C GCUGCAUC | 91 | GAUGCAGC CUGAUGAGGCCGUUAGGCCGAA IUCCGGGC | 801 |
| 324 | CGGACCGC U GCAUCCAC | 92 | GUGGAUGC CUGAUGAGGCCGUUAGGCCGAA ICGGUCCG | 802 |
| 327 | ACCGCUGC A UCCACAGU | 93 | ACUGUGGA CUGAUGAGGCCGUUAGGCCGAA ICAGCGGU | 803 |
| 330 | GCUGCAUC C ACAGUUUC | 94 | GAAACUGU CUGAUGAGGCCGUUAGGCCGAA IAUGCAGC | 804 |
| 331 | CUGCAUCC A CAGUUUCC | 95 | GGAAACUG CUGAUGAGGCCGUUAGGCCGAA IGAUGCAG | 805 |
| 333 | UCAUCCAC A GUUUCCAG | 96 | CUGGAAAC CUGAUGAGGCCGUUAGGCCGAA IUGGAUGC | 806 |
| 339 | ACAGUUUC C AGAACCUG | 97 | CAGGUUCU CUGAUGAGGCCGUUAGGCCGAA IAAACUGU | 807 |
| 340 | CAGUUUCC A GAACCUGG | 98 | CCAGGUUC CUGAUGAGGCCGUUAGGCCGAA IGAAACUG | 808 |
| 345 | UCCAGAAC C UGGGAAUC | 99 | GAUUCCCA CUGAUGAGGCCGUUAGGCCGAA IUUCUGGA | 809 |
| 346 | CCAGAACC U GGGAAUCC | 100 | GGAUUCCC CUGAUGAGGCCGUUAGGCCGAA IGUUCUGG | 810 |
| 354 | UGGGAAUC C AGUGUGUG | 101 | CACACACU CUGAUGAGGCCGUUAGGCCGAA IAUUCCCA | 811 |
| 355 | GGGAAUCC A GUGUGUGA | 102 | UCACACAC CUGAUGAGGCCGUUAGGCCGAA IGAUUCCC | 812 |
| 375 | AGCGGGAC C UGGAGCAG | 103 | CUGCUCCA CUGAUGAGGCCGUUAGGCCGAA IUCCCGCU | 813 |
| 376 | GCGGGACC U GGAGCAGG | 104 | CCUGCUCC CUGAUGAGGCCGUUAGGCCGAA IGUCCCGC | 814 |
| 382 | CCUGGAGC A GGCUAUCA | 105 | UGAUAGCC CUGAUGAGGCCGUUAGGCCGAA ICUCCAGG | 815 |
| 386 | GAGCAGGC U AUCAGUCA | 106 | UGACUGAU CUGAUGAGGCCGUUAGGCCGAA ICCUGCUC | 816 |
| 390 | AGGCUAUC A GUCAGCGC | 107 | GCGCUGAC CUGAUGAGGCCGUUAGGCCGAA IAUAGCCU | 817 |
| 394 | UAUCAGUC A GCGCAUCC | 108 | GGAUGCGC CUGAUGAGGCCGUUAGGCCGAA IACUGAUA | 818 |
| 399 | GUCAGCGC A UCCAGACC | 109 | GGUCUGGA CUGAUGAGGCCGUUAGGCCGAA ICGCUGAC | 819 |
| 402 | AGCGCAUC C AGACCAAC | 110 | GUUGGUCU CUGAUGAGGCCGUUAGGCCGAA IAUGCGCU | 820 |
| 403 | GCGCAUCC A GACCAACA | 111 | UGUUGGUC CUGAUGAGGCCGUUAGGCCGAA IGAUGCGC | 821 |
| 407 | AUCCAGAC C AACAACAA | 112 | UUGUUGUU CUGAUGAGGCCGUUAGGCCGAA IUCUGGAU | 822 |
| 408 | UCCAGACC A ACAACAAC | 113 | GUUGUUGU CUGAUGAGGCCGUUAGGCCGAA IGUCUGGA | 823 |
| 411 | AGACCAAC A ACAACCCC | 114 | GGGGUUGU CUGAUGAGGCCGUUAGGCCGAA IUUGGUCU | 824 |
| 414 | CCAACAAC A ACCCCUUC | 115 | GAAGGGGU CUGAUGAGGCCGUUAGGCCGAA IUUGUUGG | 825 |
| 417 | ACAACAAC C CCUUCCAA | 116 | UUGGAAGG CUGAUGAGGCCGUUAGGCCGAA IUUGUUGU | 826 |
| 418 | CAACAACC C CUUCCAAG | 117 | CUUGGAAG CUGAUGAGGCCGUUAGGCCGAA IGUUGUUG | 827 |
| 419 | AACAACCC C UUCCAAGU | 118 | ACUUGGAA CUGAUGAGGCCGUUAGGCCGAA IGGUUGUU | 828 |
| 420 | ACAACCCC U UCCAAGUU | 119 | AACUUGGA CUGAUGAGGCCGUUAGGCCGAA IGGGUUGU | 829 |
| 423 | ACCCCUUC C AAGUUCCU | 120 | AGGAACUU CUGAUGAGGCCGUUAGGCCGAA IAAGGGGU | 830 |
| 424 | CCCCUUCC A AGUUCCUA | 121 | UAGGAACU CUGAUGAGGCCGUUAGGCCGAA IGAAGGGG | 831 |
| 430 | CCAAGUUC C UAUAGAAG | 122 | CUUCUAUA CUGAUGAGGCCGUUAGGCCGAA IAACUUGG | 832 |
| 431 | CAAGUUCC U AUAGAAGA | 123 | UCUUCUAU CUGAUGAGGCCGUUAGGCCGAA IGAACUUG | 833 |
| 442 | AGAAGAGC A GCGUGGGG | 124 | CCCCACGC CUGAUGAGGCCGUUAGGCCGAA ICUCUUCU | 834 |
| 453 | GUGGGGAC U ACGACCUG | 125 | CAGGUCGU CUGAUGAGGCCGUUAGGCCGAA IUCCCCAC | 835 |
| 459 | ACUACGAC C UGAAUGCU | 126 | AGCAUUCA CUGAUGAGGCCGUUAGGCCGAA IUCGUAGU | 836 |
| 460 | CUACGACC U GAAUGCUG | 127 | CAGCAUUC CUGAUGAGGCCGUUAGGCCGAA IGUCGUAG | 837 |
| 467 | CUGAAUGC U GUGCGGCU | 128 | AGCCGCAC CUGAUGAGGCCGUUAGGCCGAA ICAUUCAG | 838 |
| 475 | UGUGCGGC U CUGCUUCC | 129 | GGAAGCAG CUGAUGAGGCCGUUAGGCCGAA ICCGCACA | 839 |
| 477 | UGCGGCUC U GCUUCCAG | 130 | CUGGAAGC CUGAUGAGGCCGUUAGGCCGAA IAGCCGCA | 840 |
| 480 | GGCUCUGC U UCCAGGUG | 131 | CACCUGGA CUGAUGAGGCCGUUAGGCCGAA ICAGAGCC | 841 |
| 483 | UCUGCUUC C AGGUGACA | 132 | UGUCACCU CUGAUGAGGCCGUUAGGCCGAA IAAGCAGA | 842 |
| 484 | CUGCUUCC A GGUGACAG | 133 | CUGUCACC CUGAUGAGGCCGUUAGGCCGAA IGAAGCAG | 843 |
| 491 | CAGGUGAC A GUGCGGGA | 134 | UCCCGCAC CUGAUGAGGCCGUUAGGCCGAA IUCACCUG | 844 |
| 501 | UGCGGGAC C CAUCAGGC | 135 | GCCUGAUG CUGAUGAGGCCGUUAGGCCGAA IUCCCGCA | 845 |
| 502 | GCGGGACC C AUCAGGCA | 136 | UGCCUGAU CUGAUGAGGCCGUUAGGCCGAA IGUCCCGC | 846 |
| 503 | CGGGACCC A UCAGGCAG | 137 | CUGCCUGA CUGAUGAGGCCGUUAGGCCGAA IGGUCCCG | 847 |
| 506 | GACCCAUC A GGCAGGCC | 138 | GGCCUGCC CUGAUGAGGCCGUUAGGCCGAA IAUGGGUC | 848 |
| 510 | CAUCAGGC A GGCCCCUC | 139 | GAGGGGCC CUGAUGAGGCCGUUAGGCCGAA ICCUGAUG | 849 |
| 514 | AGGCAGGC C CCUCCGCC | 140 | GGCGGAGG CUGAUGAGGCCGUUAGGCCGAA ICCUGCCU | 850 |
| 515 | GGCAGGCC C CUCCGCCU | 141 | AGGCGGAG CUGAUGAGGCCGUUAGGCCGAA IGCCUGCC | 851 |
| 516 | GCAGGCCC C UCCGCCUG | 142 | CAGGCGGA CUGAUGAGGCCGUUAGGCCGAA IGGCCUGC | 852 |
| 517 | CAGGCCCC U CCGCCUGC | 143 | GCAGGCGG CUGAUGAGGCCGUUAGGCCGAA IGGGCCUG | 853 |
| 519 | GGCCCCUC C GCCUGCCG | 144 | CGGCAGGC CUGAUGAGGCCGUUAGGCCGAA IAGGGGCC | 854 |
| 522 | CCCUCCGC C UGCCGCCU | 145 | AGGCGGCA CUGAUGAGGCCGUUAGGCCGAA ICGGAGGG | 855 |
| 523 | CCUCCGCC U GCCGCCUG | 146 | CAGGCGGC CUGAUGAGGCCGUUAGGCCGAA IGCGGAGG | 856 |
| 526 | CCGCCUGC C GCCUGUCC | 147 | GGACAGGC CUGAUGAGGCCGUUAGGCCGAA ICAGGCGG | 857 |
| 529 | CCUGCCGC C UGUCCUUU | 148 | AAAGGACA CUGAUGAGGCCGUUAGGCCGAA ICGGCAGG | 858 |
| 530 | CUGCCGCC U GUCCUUUC | 149 | GAAAGGAC CUGAUGAGGCCGUUAGGCCGAA IGCGGCAG | 859 |
| 534 | CGCCUGUC C UUUCUCAU | 150 | AUGAGAAA CUGAUGAGGCCGUUAGGCCGAA IACAGGCG | 860 |
| 535 | GCCUGUCC U UUCUCAUC | 151 | GAUGAGAA CUGAUGAGGCCGUUAGGCCGAA IGACAGGC | 861 |
| 539 | GUCCUUUC U CAUCCCAU | 152 | AUGGGAUG CUGAUGAGGCCGUUAGGCCGAA IAAAGGAC | 862 |
| 541 | CCUUUCUC A UCCCAUCU | 153 | AGAUGGGA CUGAUGAGGCCGUUAGGCCGAA IAGAAAGG | 863 |
| 544 | UUCUCAUC C CAUCUUUG | 154 | CAAAGAUG CUGAUGAGGCCGUUAGGCCGAA IAUGACAA | 864 |
| 545 | UCUCAUCC C AUCUUUGA | 155 | UCAAAGAU CUGAUGAGGCCGUUAGGCCGAP IGAUGAGA | 865 |
| 546 | CUCAUCCC A UCUUUGAC | 156 | GUCAAAGA CUGAUGAGGCCGUUAGGCCGAA IGGAUGAG | 866 |
| 549 | AUCCCAUC U UUGACAAU | 157 | AUUGUCAA CUGAUGAGGCCGUUAGGCCGAA IAUGGGAU | 867 |
| 555 | UCUUUGAC A AUCGUGCC | 158 | GGCACGAU CUGAUGAGGCCGUUAGGCCGAA IUCAAAGA | 868 |
| 563 | AAUCGUGC C CCCAACAC | 159 | GUGUUGGG CUGAUGAGGCCGUUAGGCCGAA ICACGAUU | 869 |
| 564 | AUCGUGCC C CCAACACU | 160 | AGUGUUGG CUGAUGAGGCCGUUAGGCCGAA IGCACGAU | 870 |
| 565 | UCGUGCCC C CAACACUG | 161 | CAGUGUUG CUGAUGAGGCCGUUAGGCCGAA IGGCACGA | 871 |
| 566 | CGUGCCCC C AACACUGC | 162 | GCAGUGUU CUGAUGAGGCCGUUAGGCCGAA IGGGCACG | 872 |
| 567 | GUGCCCCC A ACACUGCC | 163 | GGCAGUGU CUGAUGAGGCCGUUAGGCCGAA IGGGGCAC | 873 |
| 570 | CCCCCAAC A CUGCCGAG | 164 | CUCGGCAG CUGAUGAGGCCGUUAGGCCGAA IUUGGGGG | 874 |
| 572 | CCCAACAC U GCCGAGCU | 165 | AGCUCGGC CUGAUGAGGCCGUUAGGCCGAA IUGUUGGG | 875 |
| 575 | AACACUGC C GAGCUCAA | 166 | UUGAGCUC CUGAUGAGGCCGUUAGGCCGAA ICAGUGUU | 876 |
| 580 | UGCCGAGC U CAAGAUCU | 167 | AGAUCUUG CUGAUGAGGCCGUUAGGCCGAA ICUCGGCA | 877 |
| 582 | CCGAGCUC A AGAUCUGC | 168 | GCAGAUCU CUGAUGAGGCCGUUAGGCCGAA IAGCUCGG | 878 |
| 588 | UCAAGAUC U GCCGAGUG | 169 | CACUCGGC CUGAUGAGGCCGUUAGGCCGAA IAUCUUGA | 879 |
| 591 | AGAUCUGC C GAGUGAAC | 170 | GUUCACUC CUGAUGAGGCCGUUAGGCCGAA ICAGAUCU | 880 |
| 600 | GAGUGAAC C GAAACUCU | 171 | AGAGUUUC CUGAUGAGGCCGUUAGGCCGAA IUUCACUC | 881 |
| 606 | ACCGAAAC U CUGGCAGC | 172 | GCUGCCAG CUGAUGAGGCCGUUAGGCCGAA IUUUCGGU | 882 |
| 608 | CGAAACUC U GGCAGCUG | 173 | CAGCUGCC CUGAUGAGGCCGUUAGGCCGAA IAGUUUCG | 883 |
| 612 | ACUCUGGC A GCUGCCUC | 174 | GAGGCAGC CUGAUGAGGCCGUUAGGCCGAA ICCAGAGU | 884 |
| 615 | CUGGCAGC U GCCUCGGU | 175 | ACCGAGGC CUGAUGAGGCCGUUAGGCCGAA ICUGCCAG | 885 |
| 618 | GCAGCUGC C UCGGUGGG | 176 | CCCACCGA CUGAUGAGGCCGUUAGGCCGAA ICAGCUGC | 886 |
| 619 | CAGCUGCC U CGGUGGGG | 177 | CCCCACCG CUGAUGAGGCCGUUAGGCCGAA IGCAGCUG | 887 |
| 636 | AUGAGAUC U UCCUACUG | 178 | CAGUAGGA CUGAUGAGGCCGUUAGGCCGAA IAUCUCAU | 888 |
| 639 | AGAUCUUC C UACUGUGU | 179 | ACACAGUA CUGAUGAGGCCGUUAGGCCGAA IAAGAUCU | 889 |
| 640 | GAUCUUCC U ACUGUGUG | 180 | CACACAGU CUGAUGAGGCCGUUAGGCCGAA IGAAGAUC | 890 |
| 643 | CUUCCUAC U GUGUGACA | 181 | UGUCACAC CUGAUGAGGCCGUUAGGCCGAA IUAGGAAG | 891 |
| 651 | UGUGUGAC A AGGUGCAG | 182 | CUGCACCU CUGAUGAGGCCGUUAGGCCGAA IUCACACA | 892 |
| 658 | CAAGGUGC A GAAAGAGG | 183 | CCUCUUUC CUGAUGAGGCCGUUAGGCCGAA ICACCUUG | 893 |
| 669 | AAGAGGAC A UUGAGGUG | 184 | CACCUCAA CUGAUGAGGCCGUUAGGCCGAA IUCCUCUU | 894 |
| 684 | UGUAUUUC A CGGGACCA | 185 | UGGUCCCG CUGAUGAGGCCGUUAGGCCGAA IAAAUACA | 895 |
| 691 | CACGGGAC C AGGCUGGG | 186 | CCCAGCCU CUGAUGAGGCCGUUAGGCCGAA IUCCCGUG | 896 |
| 692 | ACGGGACC A GGCUGGGA | 187 | UCCCAGCC CUGAUGAGGCCGUUAGGCCGAA IGUCCCGU | 897 |
| 696 | GACCAGGC U GGGAGGCC | 188 | GGCCUCCC CUGAUGAGGCCGUUAGGCCGAA ICCUGGUC | 898 |
| 704 | UGGGAGGC C CGAGGCUC | 189 | GAGCCUCG CUGAUGAGGCCGUUAGGCCGAA ICCUCCCA | 899 |
| 705 | GGGAGGCC C GAGGCUCC | 190 | GGAGCCUC CUGAUGAGGCCGUUAGGCCGAA IGCCUCCC | 900 |
| 711 | CCCGAGGC U CCUUUUCG | 191 | CGAAAAGG CUGAUGAGGCCGUUAGGCCGAA ICCUCGGG | 901 |
| 713 | CGAGGCUC C UUUUCGCA | 192 | UGCGAAAA CUGAUGAGGCCGUUAGGCCGAA IAGCCUCG | 902 |
| 714 | GAGGCUCC U UUUCGCAA | 193 | UUGCGAAA CUGAUGAGGCCGUUAGGCCGAA IGAGCCUC | 903 |
| 721 | CUUUUCGC A AGCUGAUG | 194 | CAUCAGCU CUGAUGAGGCCGUUAGGCCGAA ICGAAAAG | 904 |
| 725 | UCGCAAGC U GAUGUGCA | 195 | UGCACAUC CUGAUGAGGCCGUUAGGCCGAA ICUUGCGA | 905 |
| 733 | UGAUGUOC A CCGACAAG | 196 | CUUGUCGG CUGAUGAGGCCGUUAGGCCGAA ICACAUCA | 906 |
| 735 | AUGUGCAC C GACAAGUG | 197 | CACUUGUC CUGAUGAGGCCGUUAGGCCGAA IUGCACAU | 907 |
| 739 | GCACCGAC A AGUGGCCA | 198 | UGGCCACU CUGAUGAGGCCGUUAGGCCGAA IUCGGUGC | 908 |
| 746 | CAAGUGGC C AUUGUGUU | 199 | AACACAAU CUGAUGAGGCCGUUAGGCCGAA ICCACUUG | 909 |
| 747 | AAGUGGCC A UUGUGUUC | 200 | GAACACAA CUGAUGAGGCCGUUAGGCCGAA IGCCACUU | 910 |
| 756 | UUGUGUUC C GGACCCCU | 201 | ACGGGUCC CUGAUGAGGCCGUUAGGCCGAA IAACACAA | 911 |
| 761 | UUCCGGAC C CCUCCCUA | 202 | UAGGGAGG CUGAUGAGGCCGUUAGGCCGAA IUCCGGAA | 912 |
| 762 | UCCGGACC C CUCCCUAC | 203 | GUAGGGAG CUGAUGAGGCCGUUAGGCCGAA IGUCCGGA | 913 |
| 763 | CCGGACCC C UCCCUACG | 204 | CGUAGGGA CUGAUGAGGCCGUUAGGCCGAA ICGUCCGG | 914 |
| 764 | CGGACCCC U CCCUACGC | 205 | GCGUAGGG CUGAUGAGGCCGUUAGGCCGAA IGGGLICCG | 915 |
| 766 | GACCCCUC C CUACGCAG | 206 | CUGCGUAG CUGAUGAGGCCGUUAGGCCGAA IAGGGGUC | 916 |
| 767 | ACCCCUCC C UACGCAGA | 207 | UCUGCGUA CUGAUGAGGCCGUUAGGCCGAA IGAGGGGU | 917 |
| 768 | CCCCUCCC U ACGCAGAC | 208 | GUCUGCGU CUGAUGAGGCCGUUAGGCCGAA IGGAGGGG | 918 |
| 773 | CCCUACGC A GACCCCAG | 209 | CUGGGGUC CUGAUGAGGCCGUUAGGCCGAA ICGUAGGG | 919 |
| 777 | ACGCAGAC C CCAGCCUG | 210 | CAGGCUGG CUGAUGAGGCCGUUAGGCCGAA IUCUGCGU | 920 |
| 778 | CGCAGACC C CAGCCUGC | 211 | GCAGGCUG CUGAUGAGGCCGUUAGGCCGAA IGUCUGCG | 921 |
| 779 | GCAGACCC C AGCCUGCA | 212 | UGCAGGCU CUGAUGAGGCCGUUAGGCCGAA IGGUCUGC | 922 |
| 780 | CAGACCCC A GCCUGCAG | 213 | CUGCAGGC CUGAUCAGGCCGUUAGGCCGAA IGGGUCUG | 923 |
| 783 | ACCCCAGC C UGCAGGCU | 214 | AGCCUGCA CUGAUGAGGCCGUUAGGCCGAA ICUGGGGU | 924 |
| 784 | CCCCAGCC U GCAGGCUC | 215 | GAGCCUGC CUGAUGAGGCCGUUAGGCCGAA IGCUGGGG | 925 |
| 787 | CAGCCUGC A GCCUCCUG | 216 | CAGGAGCC CUGAUGAGGCCGUUAGGCCGAA ICAGGCUG | 926 |
| 791 | CUGCACGC U CCUGUGCG | 217 | CGCACAGG CUGAUGAGGCCGUUAGGCCGAA ICCUGCAG | 927 |
| 793 | GCAGGCUC C UGUGCGUG | 218 | CACGCACA CUGAUGAGGCCGUUAGGCCGAA IAGCCUGC | 928 |
| 794 | CAGGCUCC U GUGCGUGU | 219 | ACACGCAC CUGAUGAGGCCGUUAGGCCGAA IGAGCCUG | 929 |
| 804 | UGCGUGUC U CCAUGCAG | 220 | CUGCAUGG CUGAUGAGGCCGUUAGGCCGAA IACACGCA | 930 |
| 806 | CGUGUCUC C AUGCAGCU | 221 | AGCUGCAU CUGAUGAGGCCGUUAGGCCGAA IAGACACG | 931 |
| 807 | GUGUCUCC A UGCAGCUG | 222 | CAGCUGCA CUGAUGAGGCCGUUAGGCCGAA IGAGACAC | 932 |
| 811 | CUCCAUGC A GCUGCGGC | 223 | GCCGCAGC CUGAUGAGGCCGUUAGGCCGAA ICAUGGAG | 933 |
| 814 | CAUGCAGC U GCGGCGGC | 224 | GCCGCCGC CUGAUGAGGCCGUUAGGCCGAA ICUGCAUG | 934 |
| 823 | GCGGCGGC C UUCCGACC | 225 | GGUCGGAA CUGAUGAGGCCGUUAGGCCGAA ICCGCCGC | 935 |
| 824 | CGGCGGCC U UCCGACCG | 226 | CGGUCGGA CUGAUGAGGCCGUUAGGCCGAA IGCCGCCG | 936 |
| 827 | CGGCCUUC C GACCGGGA | 227 | UCCCGGUC CUGAUGAGGCCGUUAGGCCGAA IAAGGCCG | 937 |
| 831 | CUUCCGAC C GGGAGCUC | 228 | GAGCUCCC CUGAUGAGGCCGUUAGGCCGAA IUCGGAAG | 938 |
| 838 | CCGGGAGC U CAGUGAGC | 229 | GCUCACUG CUGAUGAGGCCGUUAGGCCGAA ICUCCCGG | 939 |
| 840 | GGGAGCUC A GUGAGCCC | 230 | GGGCUCAC CUGAUGAGGCCGUUAGGCCGAA IAGCUCCC | 940 |
| 847 | CAGUGAGC C CAUGGAAU | 231 | AUUCCAUG CUGAUGAGGCCGUUAGGCCGAA ICUCACUG | 941 |
| 848 | AGUGAGCC C AUGGAAUU | 232 | AAUUCCAU CUGAUGAGGCCGUUAGGCCGAA IGCUCACU | 942 |
| 849 | GUGAGCCC A UGGAAUUC | 233 | GAAUUCCA CUGAUGAGGCCGUUAGGCCGAA IGGCUCAC | 943 |
| 858 | UGGAAUUC C AGUACCUG | 234 | CAGGUACU CUGAUGAGGCCGUUAGGCCGAA IAAUUCCA | 944 |
| 859 | GGAAUUCC A GUACCUGC | 235 | GCAGGUAC CUGAUGAGGCCGUUAGGCCGAA IGAAUUCC | 945 |
| 864 | UCCAGUAC C UGCCAGAU | 236 | AUCUGGCA CUGAUGAGGCCGUUAGGCCGAA IUACUGGA | 946 |
| 865 | CCAGUACC U GCCAGAUA | 237 | UAUCUGGC CUGAUGAGGCCGUUAGGCCGAA IGUACUGG | 947 |
| 868 | GUACCUGC C AGAUACAG | 238 | CUGUAUCU CUGAUGGAGCCGUUAGGCCGAA ICAGGUAC | 948 |
| 869 | UACCUGCC A GAUACAGA | 239 | UCUGUAUC CUGAUGAGGCCGUUAGGCCGAA IGCAGGUA | 949 |
| 875 | CCAGAUAC A GACGAUCG | 240 | CGAUCGUC CUGAUGAGGCCGUUAGGCCGAA IUAUCUGG | 950 |
| 886 | CGAUCGUC A CCGGAUUG | 241 | CAAUCCGG CUGAUGAGGCCGUUAGGCCGAA IACGAUCG | 951 |
| 888 | AUCGUCAC C GGAUUGAG | 242 | CUCAAUCC CUGAUGAGGCCGUUAGGCCGAA IUGACGAU | 952 |
| 914 | AAAAGGAC A UAUGAGAC | 243 | GUCUCAUA CUGAUGAGGCCGUUAGGCCGAA IUCCUUUU | 953 |
| 923 | UAUGAGAC C UUAAAGAG | 244 | CUCUUGAA CUGAUGAGGCCGUUAGGCCGAA IUCUCAUA | 954 |
| 924 | AUGAGACC U UCAAGAGC | 245 | GCUCUUGA CUGAUGAGGCCGUUAGGCCGAA IGUCUCAU | 955 |
| 927 | AGACCUUC A AGAGCAUC | 246 | GAUGCUCU CUGAUGAGGCCGUUAGGCCGAA IAAGGUCU | 956 |
| 933 | UCAAGAGC A UCAUGAAG | 247 | CUUCAUGA CUGAUGAGGCCGUUAGGCCGAA ICUCUUGA | 957 |
| 936 | AGAGCAUC A UGAAGAAG | 248 | CUUCUUCA CUGAUGAGGCCGUUAGGCCGAA IAUGCUCU | 958 |
| 949 | GAAGAGUC C UUUCAGCG | 249 | CGCUGAAA CUGAUGAGGCCGUUAGGCCGAA IACUCUUC | 959 |
| 950 | AAGAGUCC U UUCAGCGG | 250 | CCGCUGAA CUGAUGAGGCCGUUAGGCCGAA IGACUCUU | 960 |
| 954 | GUCCUUUC A GCGGACCC | 251 | GGGUCCGC CUGAUGAGGCCGUUAGGCCGAA IAAAGGAC | 961 |
| 961 | CAGCGGAC C CACCGACC | 252 | GGUCGGUG CUGAUGAGGCCGUUAGGCCGAA IUCCGCUG | 962 |
| 962 | AGCGGACC C ACCGACCC | 253 | GGGUCGGU CUGAUGAGGCCGUUAGGCCGAA IGUCCGCU | 963 |
| 963 | GCGGACCC A CCGACCCC | 254 | GGGGUCGG CUGAUGAGGCCGUUAGGCCGAA IGGUCCGC | 964 |
| 965 | GGACCCAC C GACCCCCG | 255 | CGGGGGUC CUGAUGAGGCCGUUAGGCCGAA IUGGGUCC | 965 |
| 969 | CCACCGAC C CCCGGCCU | 256 | AGGCCGGG CUGAUGAGGCCGUUAGGCCGAA IUCGGUGG | 966 |
| 970 | CACCGACC C CCGGCCUC | 257 | GAGGCCGG CUGAUGAGGCCGUUAGGCCGAA IGUCGGUG | 967 |
| 971 | ACCGACCC C CGGCCUCC | 258 | GGAGGCCG CUGAUGAGGCCGUUAGGCCGAA IGGUCGGU | 968 |
| 972 | CCGACCCC C GGCCUCCA | 259 | UGGAGGCC CUGAUGAGGCCGUUAGGCCGAA IGGGUCGG | 969 |
| 976 | CCCCCGGC C UCCACCUC | 260 | GAGGUGGA CUGAUGAGGCCGUUAGGCCGAA ICCGGGGG | 970 |
| 977 | CCCCGGCC U CCACCUCG | 261 | CGAGGUGG CUGAUGAGGCCGUUAGGCCGAA IGCCGGGG | 971 |
| 979 | CCGGCCUC C ACCUCGAC | 262 | GUCGAGGU CUGAUGAGGCCGUUAGGCCGAA IAGGCCGG | 972 |
| 980 | CGGCCUCC A CCUCGACG | 263 | CGUCGAGG CUGAUGAGGCCGUUAGGCCGAA IGAGGCCG | 973 |
| 982 | GCCUCCAC C UCGACGCA | 264 | UGCGUCGA CUGAUGAGGCCGUUAGGCCGAA IUGGAGGC | 974 |
| 983 | CCUCCACC U CGACGCAU | 265 | AUGCGUCG CUGAUGAGGCCGUUAGGCCGAA IGUGGAGG | 975 |
| 990 | CUCGACGC A UUGCUGUG | 266 | CACAGCAA CUGAUGAGGCCGUUAGGCCGAA ICGUCGAG | 976 |
| 995 | CGCAUUGC U GUGCCUUC | 267 | GAAGGCAC CUGAUGAGGCCGUUAGGCCGAA ICAAUGCG | 977 |
| 1000 | UGCUGUGC C UUCCCGCA | 268 | UGCGGGAA CUGAUGAGGCCGUUAGGCCGAA ICACAGCA | 978 |
| 1001 | GCUGUGCC U UCCCGCAG | 269 | CUGCGGGA CUGAUGAGGCCGUUAGGCCGAA IGCACAGC | 979 |
| 1004 | GUGCCUUC C CGCAGCUC | 270 | GAGCUGCG CUGAUGAGGCCGUUAGGCCGAA IAAGGCAC | 980 |
| 1005 | UGCCUUCC C GCAGCUCA | 271 | UGAGCUGC CUGAUGAGGCCGUUAGGCCGAA IGAAGGCA | 981 |
| 1008 | CUUCCCGC A GCUCAGCU | 272 | AGCUGAGC CUGAUGAGGCCGUUAGGCCGAA ICGGGAAG | 982 |
| 1011 | CCCGCAGC U CAGCUUCU | 273 | AGAAGCUG CUGAUGAGGCCGUUAGGCCGAA ICUGCGGG | 983 |
| 1013 | CGCAGCUC A GCUUCUGU | 274 | ACAGAAGC CUGAUGAGGCCGUUAGGCCGAA IAGCUGCG | 984 |
| 1016 | AGCUCAGC U UCUGUCCC | 275 | GGGACAGA CUGAUGAGGCCGUUAGGCCGAA ICUGAGCU | 985 |
| 1019 | UCAGCUUC U GUCCCCAA | 276 | UUGGGGAC CUGAUGAGGCCGUUAGGCCGAA IAAGCUGA | 986 |
| 1023 | CUUCUGUC C CCAAGCCA | 277 | UGGCUUGG CUGAUGAGGCCGUUAGGCCGAA IACAGAAG | 987 |
| 1024 | UUCUGUCC C CAAGCCAG | 278 | CUGGCUUG CUGAUGAGGCCGUUAGGCCGAA IGACAGAA | 988 |
| 1025 | UCUGUCCC C AAGCCAGC | 279 | GCUGGCUU CUGAUGAGGCCGUUAGGCCGAA IGGACAGA | 989 |
| 1026 | CUGUCCCC A AGCCAGCA | 280 | UGCUGGCU CUGAUGAGGCCGUUAGGCCGAA IGGGACAG | 990 |
| 1030 | CCCCAAGC C AGCACCCC | 281 | GGGGUGCU CUGAUGAGGCCGUUAGGCCGAA ICUUGGGG | 991 |
| 1031 | CCCAAGCC A GCACCCCA | 282 | UGGGGUGC CUGAUGAGGCCGUUAGGCCGAA IGCUUGGG | 992 |
| 1034 | AAGCCAGC A CCCCAGCC | 283 | GGCUGGGG CUGAUGAGGCCGUUAGGCCGAA ICUGGCUU | 993 |
| 1036 | GCCAGCAC C CCAGCCCU | 284 | AGGGCUGG CUGAUGAGGCCGUUAGGCCGAA IUGCUGGC | 994 |
| 1037 | CCAGCACC C CAGCCCUA | 285 | UAGGGCUG CUGAUGAGGCCGUUAGGCCGAA IGUGCUGG | 995 |
| 1038 | CAGCACCC C AGCCCUAU | 286 | AUAGGGCU CUGAUGAGGCCGUUAGGCCGAA IGGUGCUG | 996 |
| 1039 | AGCACCCC A GCCCUAUC | 287 | GAUAGGGC CUGAUGAGGCCGUUAGGCCGAA IGGGUGCU | 997 |
| 1042 | ACCCCAGC C CUAUCCCU | 288 | AGGGAUAG CUGAUGAGGCCGUUAGGCCGAA ICUGGGGU | 998 |
| 1043 | CCCCAGCC C UAUCCCUU | 289 | AAGGGAUA CUGAUGAGGCCGUUAGGCCGAA IGCUGGGG | 999 |
| 1044 | CCCAGCCC U AUCCCUUU | 290 | AAAGGGAU CUGAUGAGGCCGUUAGGCCGAA IGGCUGGG | 1000 |
| 1048 | GCCCUAUC C CUUUACGU | 291 | ACGUAAAG CUGAUGAGGCCGUUAGGCCGAA IAUAGGGC | 1001 |
| 1049 | CCCUAUCC C UUUACGUC | 292 | GACGUAAA CUGAUGAGGCCGUUAGGCCGAA IGAUAGGG | 1002 |
| 1050 | CCUAUCCC U UUACGUCA | 293 | UGACGUAA CUGAUGAGGCCGUUAGGCCGAA IGGAUAGG | 1003 |
| 1058 | UUUACGUC A UCCCUGAG | 294 | CUCAGGGA CUGAUGAGGCCGUUAGGCCGAA IACGUAAA | 1004 |
| 1061 | ACGUCAUC C CUGAGCAC | 295 | GUGCUCAG CUGAUGAGGCCGUUAGGCCGAA IAUGACGU | 1005 |
| 1062 | CGUCAUCC C UGAGCACC | 296 | GGUGCUCA CUGAUGAGGCCGUUAGGCCGAA IGAUGACG | 1006 |
| 1063 | GUCAUCCC U GAGCACCA | 297 | UGGUGCUC CUGAUGAGGCCGUUAGGCCGAA IGGAUGAC | 1007 |
| 1068 | CCCUGAGC A CCAUCAAC | 298 | GUUGAUGG CUGAUGAGGCCGUUAGGCCGAA ICUCAGGG | 1008 |
| 1070 | CUGAGCAC C AUCAACUA | 299 | UAGUUGAU CUGAUGAGGCCGUUAGGCCGAA IUGCUCAG | 1009 |
| 1071 | UGAGCACC A UCAACUAU | 300 | AUAGUUGA CUGAUGAGGCCGUUAGGCCGAA IGUGCUCA | 1010 |
| 1074 | GCACCAUC A ACUAUGAU | 301 | AUCAUAGU CUGAUGAGGCCGUUAGGCCGAA IAUGGUGC | 1011 |
| 1077 | CCAUCAAC U AUGAUGAG | 302 | CUCAUCAU CUGAUGAGGCCGUUAGGCCGAA IUUGAUGG | 1012 |
| 1090 | UGAGUUUC C CACCAUGG | 303 | CCAUGGUG CUGAUGAGGCCGUUAGGCCGAA IAAACUCA | 1013 |
| 1091 | GAGUUUCC C ACCAUGGU | 304 | ACCAUGGU CUGAUGAGGCCGUUAGGCCGAA IGAAACUC | 1014 |
| 1092 | AGUUUCCC A CCAUGGUG | 305 | CACCAUGG CUGAUGAGGCCGUUAGGCCGAA IGGAAACU | 1015 |
| 1094 | UUUCCCAC C AUGGUGUU | 306 | AACACCAU CUGAUGAGGCCGUUAGGCCGAA IUGGGAAA | 1016 |
| 1095 | UUCCCACC A UGGUGUUU | 307 | AAACACCA CUGAUGAGGCCGUUAGGCCGAA IGUGGGAA | 1017 |
| 1105 | GGUGUUUC C UUCUGGGC | 308 | GCCCAGAA CUGAUGAGGCCGUUAGGCCGAA IAAACACC | 1018 |
| 1106 | GUGUUUCC U UCUGGGCA | 309 | UGCCCAGA CUGAUGAGGCCGUUAGGCCGAA IGAAACAC | 1019 |
| 1109 | UUUCCUUC U GGGCAGAU | 310 | AUCUGCCC CUGAUGAGGCCGUUAGGCCGAA IAAGGAAA | 1020 |
| 1114 | UUCUGGGC A GAUCAGCC | 311 | GGCUGAUC CUGAUGAGGCCGUUAGGCCGAA ICCCAGAA | 1021 |
| 1119 | GGCAGAUC A GCCAGGCC | 312 | GGCCUGGC CUGAUGAGGCCGUUAGGCCGAA IAUCUGCC | 1022 |
| 1122 | AGAUCAGC C AGGCCUCG | 313 | CGAGGCCU CUGAUGAGGCCGUUAGGCCGAA ICUGAUCU | 1023 |
| 1123 | GAUCAGCC A GGCCUCGG | 314 | CCGAGGCC CUGAUGAGGCCGUUAGGCCGAA IGCUGAUC | 1024 |
| 1127 | AGCCAGGC C UCGGCCUU | 315 | AAGGCCGA CUGAUGAGGCCGUUAGGCCGAA ICCUGGCU | 1025 |
| 1128 | GCCAGGCC U CGGCCUUG | 316 | CAAGGCCG CUGAUGAGGCCGUUAGGCCGAA IGCCUGGC | 1026 |
| 1133 | GCCUCGGC C UUGGCCCC | 317 | GGGGCCAA CUGAUGAGGCCGUUAGGCCGAA ICCGAGGC | 1027 |
| 1134 | CCUCGGCC U UGGCCCCG | 318 | CGCGGCCA CUGAUGAGGCCGUUAGGCCGAA ICCCGAGG | 1028 |
| 1139 | GCCUUGGC C CCGGCCCC | 319 | GGGGCCGG CUGAUGAGGCCGUUAGGCCGAA ICCAAGGC | 1029 |
| 1140 | CCUUGGCC C CGGCCCCU | 320 | ACGGGCCG CUGAUGAGGCCGUUAGGCCGAA IGCCAAGG | 1030 |
| 1141 | CUUGGCCC C GGCCCCUC | 321 | GAGGGGCC CUGAUGAGGCCGUUAGGCCGAA IGGCCAAG | 1031 |
| 1145 | GCCCCGGC C CCUCCCCA | 322 | UGGGGAGG CUGAUGAGGCCGUUAGGCCGAA ICCGGGGC | 1032 |
| 1146 | CCCCGGCC C CUCCCCAA | 323 | UUGGGGAG CUGAUGAGGCCGUUAGGCCGAA IGCCGGGG | 1033 |
| 1147 | CCCGGCCC C UCCCCAAG | 324 | CUUGGGGA CUGAUGAGGCCGUUAGGCCGAA IGGCCGGG | 1034 |
| 1148 | CCGGCCCC U CCCCAAGU | 325 | ACUUCGGG CUGAUGAGGCCGUUAGGCCGAA IGGGCCGG | 1035 |
| 1150 | GGCCCCUC C CCAAGUCC | 326 | GGACUUGG CUGAUGAGGCCGUUAGGCCGAA IAGGGCCC | 1036 |
| 1151 | GCCCCUCC C CAAGUCCU | 327 | AGGACUUG CUGAUGAGGCCGUUAGGCCGAA IGAGGGGC | 1037 |
| 1152 | CCCCUCCC C AAGUCCUG | 328 | CAGGACUU CUGAUGAGGCCGUUAGGCCGAA IGGAGGGG | 1038 |
| 1153 | CCCUCCCC A ACUCCUGC | 329 | GCAGGACU CUGAUGAGGCCGUUAGGCCGAA IGGGAGGG | 1039 |
| 1158 | CCCAAGUC C UGCCCCAG | 330 | CUGGGGCA CUGAUGAGGCCGUUAGGCCGAA IACUUGGG | 1040 |
| 1159 | CCAAGUCC U GCCCCAGG | 331 | CCUGGGGC CUGAUGAGGCCGUUAGGCCGAA IGACUUGG | 1041 |
| 1162 | AGUCCUGC C CCAGGCUC | 332 | GAGCCUGG CUGAUGAGGCCGUUAGGCCGAA ICAGGACU | 1042 |
| 1163 | GUCCUCCC C CAGGCUCC | 333 | GGAGCCUG CUGAUGAGGCCGUUAGGCCGAA IGCAGGAC | 1043 |
| 1164 | UCCUGCCC C AGGCUCCA | 334 | UGGAGCCU CUGAUGAGGCCGUUAGGCCGAA IGGCAGGA | 1044 |
| 1165 | CCUGCCCC A GGCUCCAG | 335 | CUGGAGCC CUGAUGAGGCCGUUAGGCCGAA IGGGCAGG | 1045 |
| 1169 | CCCCAGGC U CCAGCCCC | 336 | GGGGCUGG CUGAUGAGGCCGUUAGGCCGAA ICCUGGGG | 1046 |
| 1171 | CCAGGCUC C AGCCCCUG | 337 | CAGGGGCU CUGAUGAGGCCGUUAGGCCGAA IAGCCUGG | 1047 |
| 1172 | CAGGCUCC A GCCCCUGC | 338 | GCAGGGGC CUGAUGAGGCCGUUAGGCCGAA IGAGCCUG | 1048 |
| 1175 | GCUCCAGC C CCUGCCCC | 339 | GGGGCAGG CUGAUGAGGCCGUUAGGCCGAA ICUGGAGC | 1049 |
| 1176 | CUCCAGCC C CUGCCCCU | 340 | AGGGGCAG CUGAUGAGGCCGUUAGGCCGAA IGCUGGAG | 1050 |
| 1177 | UCCAGCCC C UGCCCCUG | 341 | CAGGGGCA CUGAUGAGGCCGUUAGGCCGAA IGGCUGGA | 1051 |
| 1178 | CCAGCCCC U GCCCCUGC | 342 | GCAGGGGC CUGAUGAGGCCGUUAGGCCGAA IGGGCUGG | 1052 |
| 1181 | GCCCCUGC C CCUGCUCC | 343 | GGAGCAGG CUGAUGAGGCCGUUAGGCCGAA ICAGGGGC | 1053 |
| 1182 | CCCCUGCC C CUGCUCCA | 344 | UGGAGCAG CUGAUGAGGCCGUUAGGCCGAA IGCAGGGG | 1054 |
| 1183 | CCCUGCCC C UGCUCCAG | 345 | CUGGAGCA CUGAUGAGGCCGUUAGGCCGAA IGGCAGGG | 1055 |
| 1184 | CCUGCCCC U GCUCCAGC | 346 | GCUGGAGC CUGAUGAGGCCGUUAGGCCGAA IGGGCAGG | 1056 |
| 1187 | GCCCCUCC U CCAGCCAU | 347 | AUGGCUGG CUGAUGAGGCCGUUAGGCCGAA ICAGGGGC | 1057 |
| 1189 | CCCUGCUC C AGCCAUGG | 348 | CCAUGGCU CUGAUGAGGCCGUUAGGCCGAA IAGCAGGG | 1058 |
| 1190 | CCUGCUCC A GCCAUGGU | 349 | ACCAUGGC CUGAUGAGGCCGUUAGGCCGAA IGAGCAGG | 1059 |
| 1193 | GCUCCAGC C AUGGUAUC | 350 | GAUACCAU CUGAUGAGGCCOUUAGGCCGAA ICUGGAGC | 1060 |
| 1194 | CUCCAGCC A UGGUAUCA | 351 | UGAUACCA CUGAUGAGGCCGUUAGGCCGAA IGCUGGAG | 1061 |
| 1202 | AUGGUAUC A GCUCUGGC | 352 | GCCAGAGC CUGAUGAGGCCGUUAGGCCGAA IAUACCAU | 1062 |
| 1205 | GUAUCAGC U CUGGCCCA | 353 | UGGGCCAG CUGAUGAGGCCGUUAGGCCGAA ICUGAUAC | 1063 |
| 1207 | AUCAGOUC U GGCCCAGG | 354 | CCUGGGCC CUGAUGAGGCCGUUAGGCCGAA IAGCUGAU | 1064 |
| 1211 | GCUCUGGC C CAGGCCCC | 355 | GGGGCCUG CUGAUGAGGCCGUUAGGCCGAA ICCAGAGC | 1065 |
| 1212 | CUCUGGCC C AGGCCCCA | 356 | UGGGGCCU CUGAUGAGGCCGUUAGGCCGAA IGCCAGAG | 1066 |
| 1213 | UCUGGCCC A GGCCCCAG | 357 | CUGGGGCC CUGAUGAGGCCGUUAGGCCGAA IGGCCAGA | 1067 |
| 1217 | GCCCAGGC C CCAGCCCC | 358 | GGGGCUGG CUGAUGAGGCCGUUAGGCCGAA ICCUGGGC | 1068 |
| 1218 | CCCAGGCC C CAGCCCCU | 359 | AGGGGCUG CUGAUGAGGCCGUUAGGCCGAA IGCCUGGG | 1069 |
| 1219 | CCAGGCCC C AGCCCCUG | 360 | CAGGGGCU CUGAUGAGGCCGUUAGGCCGAA IGGCCUGG | 1070 |
| 1220 | CAGGCCCC A GCCCCUGU | 361 | ACAGGGGC CUGAUGAGGCCGUUAGGCCGAA IGGGCCUG | 1071 |
| 1223 | GCCCCAGC C CCUGUCCC | 362 | GGGACAGG CUGAUGAGGCCGUUAGGCCGAA ICUGGGGC | 1072 |
| 1224 | CCCCAGCC C CUGUCCCA | 363 | UGGGACAG CUGAUGAGGCCGUUAGGCCGAA IGCUGGGG | 1073 |
| 1225 | CCCAGCCC C UGUCCCAG | 364 | CUGGGACA CUGAUGAGGCCGUUAGGCCGAA IGGCUGGG | 1074 |
| 1226 | CCAGCCCC U GUCCCAGU | 365 | ACUGGGAC CUGAUGAGGCCGUUAGGCCGAA IGGGCUGG | 1075 |
| 1230 | CCCCUGUC C CAGUCCUA | 366 | UAGGACUG CUGAUGAGGCCGUUAGGCCGAA IACAGGGG | 1076 |
| 1231 | CCCUGUCC C AGUCCUAG | 367 | CUAGGACU CUGAUGAGGCCGUUAGGCCGAA IGACAGGG | 1077 |
| 1232 | CCUGUCCC A GUCCUAGC | 368 | GCUAGGAC CUGAUGAGGCCGUUAGGCCGAA IGGACAGG | 1078 |
| 1236 | UCCCAGUC C UAGCCCCA | 369 | UGGGGCUA CUGAUGAGGCCGUUAGGCCGAA IACUGGGA | 1079 |
| 1237 | CCCAGUCC U AGCCCCAG | 370 | CUGGGGCU CUGAUGAGGCCGUUAGGCCGAA IGACUGGG | 1080 |
| 1241 | GUCCUAGC C CCAGGCCC | 371 | GGGCCUGG CUGAUGAGGCCGUUAGGCCGAA ICUAGGAC | 1081 |
| 1242 | UCCUAGCC C CAGGCCCU | 372 | AGGGCCUG CUGAUGAGGCCGUUAGGCCGAA IGCUAGGA | 1082 |
| 1243 | CCUAGCCC C AGGCCCUC | 373 | GAGGGCCU CUGAUGAGGCCGUUAGGCCGAA IGGCUAGG | 1083 |
| 1244 | CUAGCCCC A GGCCCUCC | 374 | GGAGGGCC CUGAUGAGGCCGUUAGGCCGAA IGGGCUAG | 1084 |
| 1248 | CCCCAGGC C CUCCUCAG | 375 | CUGAGGAG CUGAUGAGGCCGUUAGGCCGAA ICCUGGGG | 1085 |
| 1249 | CCCAGGCC C UCCUCAGG | 376 | CCUGAGGA CUGAUGAGGCCGUUAGGCCGAA IGCCUGGG | 1086 |
| 1250 | CCAGGCCC U CCUCAGGC | 377 | GCCUGAGG CUGAUGAGGCCGUUAGGCCGAA IGGCCUGG | 1087 |
| 1252 | AGGCCCUC C UCAGGCUG | 378 | CAGCCUGA CUGAUGAGGCCGUUAGGCCGAA IAGGGCCU | 1088 |
| 1253 | GGCCCUCC U CAGGCUGU | 379 | ACAGCCUG CUGAUGAGGCCGUUAGGCCGAA IGAGGGCC | 1089 |
| 1255 | CCCUCCUC A GGCUGUGG | 380 | CCACAGCC CUGAUGAGGCCGUUAGGCCGAA IAGGAGGG | 1090 |
| 1259 | CCUCAGGC U GUGGCCCC | 381 | GGGGCCAC CUGAUGAGGCCGUUAGGCCGAA ICCUGAGG | 1091 |
| 1265 | GCUGUGGC C CCACCUGC | 382 | GCAGGUGG CUGAUGAGGCCGUUAGGCCGAA ICCACAGC | 1092 |
| 1266 | CUGUGGCC C CACCUGCC | 383 | GGCAGGUG CUGAUGAGGCCGUUAGGCCGAA IGCCACAG | 1093 |
| 1267 | UGUGGCCC C ACCUGCCC | 384 | GGGCAGGU CUGAUGAGGCCGUUAGGCCGAA IGOCCACA | 1094 |
| 1268 | GUGGCCCC A CCUGCCCC | 385 | GGGGCAGG CUGAUGAGGCCGUUAGGCCGAA IGGGCCAC | 1095 |
| 1270 | GGCCCCAC C UGCCCCCA | 386 | UGGGGGCA CUGAUGAGGCCGUUAGGCCGAA IUGGGGCC | 1096 |
| 1271 | GCCCCACC U GCCCCCAA | 387 | UUGGGGGC CUGAUGAGGCCGUUAGGCCGAA IGUGGGGC | 1097 |
| 1274 | CCACCUGC C CCCAAGCC | 388 | GGCUUGGG CUGAUGAGGCCGUUAGGCCGAA ICAGGUGC | 1098 |
| 1275 | CACCUGCC C CCAAGCCC | 389 | GGGCUUGG CUGAUGAGGCCGUUAGGCCGAA IGCAGGUG | 1099 |
| 1276 | ACCUGCCC C CAAGCCCA | 390 | UGGGCUUG CUGAUGAGGCCGUUAGGCCGAA IGGCAGGU | 1100 |
| 1277 | CCUGCCCC C AAGCCCAC | 391 | GUGGGCUU CUGAUGAGGCCGUUAGGCCGAA IGGGCAGG | 1101 |
| 1278 | CUGCCCCC A AGCCCACC | 392 | GGUGGGCU CUGAUGAGGCCGUUAGGCCGAA IGGGGCAG | 1102 |
| 1282 | CCCCAAGC C CACCCAGG | 393 | CCUGGGUG CUGAUGAGGCCGUUAGGCCGAA ICUUGGGG | 1103 |
| 1283 | CCCAAGCC C ACCCAGGC | 394 | GCCUGGGU CUGAUGAGGCCGUUAGGCCGAA IGCUUGGG | 1104 |
| 1284 | CCAAGCCC A CCCAGGCU | 395 | AGCCUGGG CUGAUGAGGCCGUUAGGCCGAA IGGCUUGG | 1105 |
| 1286 | AAGCCCAC C CAGGCUGG | 396 | CCAGCCUG CUGAUGAGGCCGUUAGGCCGAA IUGGGCUU | 1106 |
| 1287 | AGCCCACC C AGGCUGGG | 397 | CCCAGCCU CUGAUGAGGCCGUUAGGCCGAA IGUGGGCU | 1107 |
| 1288 | GCCCACCC A GGCUGGGG | 398 | CCCCAGCC CUGAUGAGGCCGUUAGGCCGAA IGGUGGGC | 1108 |
| 1292 | ACCCAGGC U GGGGAAGG | 399 | CCUUCCCC CUGAUGAGGCCGUUAGGCCGAA ICCUGGGU | 1109 |
| 1306 | AGGAACGC U GUCAGAGG | 400 | CCUCUGAC CUGAUGAGGCCGUUAGGCCGAA ICGUUCCU | 1110 |
| 1310 | ACGCUGUC A GAGGCCCU | 401 | AGGGCCUC CUGAUGAGGCCGUUAGGCCGAA IACAGCGU | 1111 |
| 1316 | UCAGAGGC C CUGCUGCA | 402 | UGCAGCAG CUGAUGAGGCCGUUAGGCCGAA ICCUCUGA | 1112 |
| 1317 | CAGAGGCC C UGCUGCAG | 403 | CUGCAGCA CUGAUGAGGCCGUUAGGCCGAA IGCCUCUG | 1113 |
| 1318 | AGAGGCCC U GCUGCAGC | 404 | GCUGCAGC CUGAUGAGGCCGUUAGGCCGAA IGGCCUCU | 1114 |
| 1321 | GGCCCUGC U GCAGCUGC | 405 | GCAGCUGC CUGAUGAGGCCGUUAGGCCGAA ICAGGGCC | 1115 |
| 1324 | CCUGCUGC A GCUGCAGU | 406 | ACUGCAGC CUGAUGAGGCCGUUAGGCCGAA ICAGCAGG | 1116 |
| 1327 | GCUGCAGC U GCAGUUUG | 407 | CAAACUGC CUGAUGAGGCCGUUAGGCCGAA ICUGCAGC | 1117 |
| 1330 | GCAGCUGC A GUUUGAUG | 408 | CAUCAAAC CUGAUGAGGCCGUUAGGCCGAA ICAGCUGC | 1118 |
| 1347 | AUGAAGAC C UGGGGGCC | 409 | GCCCCCCA CUGAUGAGGCCGUUAGGCCGAA IUCUUCAU | 1119 |
| 1348 | UGAAGACC U GGGGGCCU | 410 | ACGCCCCC CUGAUGAGGCCGUUAGGCCGAA IGUCUUCA | 1120 |
| 1355 | CUGGGGGC C UUGCUUGG | 411 | CCAAGCAA CUGAUGAGGCCGUUAGGCCGAA ICCCCCAG | 1121 |
| 1356 | UGGGGGCC U UGCUUGGC | 412 | GCCAAGCA CUGAUGAGGCCGUUAGGCCGAA IGCCCCCA | 1122 |
| 1360 | GGCCUUGC U UGGCAACA | 413 | UCUUGCCA CUGAUGAGGCCGUUAGGCCGAA ICAAGGCC | 1123 |
| 1365 | UGCUUGGC A ACAGCACA | 414 | UGUGCUGU CUGAUGAGGCCGUUAGGCCGAA ICCAACCA | 1124 |
| 1368 | UUGGCAAC A GCACAGAC | 415 | GUCUGUGC CUGAUGAGGCCGUUAGGCCGAA IUUGCCAA | 1125 |
| 1371 | GCAACAGC A CAGACCCA | 416 | UGGGUCUG CUGAUGAGGCCGUUAGGCCGAA ICUGUUGC | 1126 |
| 1373 | AACAGCAC A GACCCAGC | 417 | GCUGGGUC CUGAUGAGGCCGUUAGGCCGAA IUGCUGUU | 1127 |
| 1377 | GOACAGAC C CAGCUGUG | 418 | CACAGCUG CUGAUGAGGCCGUUAGGCCGAA IUCUGUGC | 1128 |
| 1378 | CACAGACC C AGCUGUGU | 419 | ACACAGCU CUGAUGAGGCCGUUAGGCCGAA IGUCUGUG | 1129 |
| 1379 | ACAGACCC A GCUGUGUU | 420 | AACACAGC CUGAUGAGGCCGUUAGGCCGAA IGGUCUGU | 1130 |
| 1382 | GACCCAGC U GUGUUCAC | 421 | GUGAACAC CUGAUGAGGCCGUUAGGCCGAA ICUGGGUC | 1131 |
| 1389 | CUGUGUUC A CAGACCUG | 422 | CAGGUCUG CUGAUGAGGCCGUUAGGCCGAA IAACACAG | 1132 |
| 1391 | GUGGUCAC A GACCUGGC | 423 | GCCAGGUC CUGAUGAGGCCGUUAGGCCGAA IUGAACAC | 1133 |
| 1395 | UCACAGAC C UGGCAUCC | 424 | GGAUGCCA CUGAUGAGGCCGUUAGGCCGAA IUCUGUGA | 1134 |
| 1396 | CACAGACC U GGCAUCCG | 425 | CGGAUGCC CUGAUGAGGCCGUUAGGCCGAA IGUCUGUG | 1135 |
| 1400 | GACCUGGC A UCCGUCGA | 426 | UCGACGGA CUGAUGAGGCCGUUAGGCCGAA ICCAGGUC | 1136 |
| 1403 | CUGGCAUC C GUCGACAA | 427 | UUGUCGAC CUGAUGAGGCCGUUAGGCCGAA IAUGCCAG | 1137 |
| 1410 | CCGUCGAC A ACUCCGAG | 428 | CUCGGAGU CUGAUGAGGCCGUUAGGCCGAA IUCGACGG | 1138 |
| 1413 | UCGACAAC U CCGAGUIJU | 429 | AAACUCGG CUGAUGAGGCCGUUAGGCCGAA IUUGUCGA | 1139 |
| 1415 | GACAACUC C GAGUUUCA | 430 | UGAAACUC CUGAUGAGGCCGUUAGGCCGAA IAGUUGUC | 1140 |
| 1423 | CGAGUUUC A GCAGCUGC | 431 | GCAGCUGC CUGAUGAGGCCGUUAGGCCGAA IAAACUCG | 1141 |
| 1426 | GUU1ICAGC A GCUGCUGA | 432 | UCAGCAGC CUGAUGAGGCCGUUAGGCCGAA ICUGAAAC | 1142 |
| 1429 | UCAGCAGC U GCUGAACC | 433 | GGUUCAGC CUGAUGAGGCCGUUAGGCCGAA ICUGCUGA | 1143 |
| 1432 | GCAGCUGC U GAACCAGG | 434 | CCUGGUUC CUGAUGAGGCCGUUAGGCCGAA ICAGCUGC | 1144 |
| 1437 | UGCUGAAC C AGGGCAUA | 435 | UAUGCCCU CUGAUGAGGCCGUUAGGCCGAA IUUCAGCA | 1145 |
| 1438 | GCUGAACC A GGGCAUAC | 436 | GUAUGCCC CUGAUGAGGCCGUUAGGCCGAA IGUUCAGC | 1146 |
| 1443 | ACCAGGGC A UACCUGUG | 437 | CACAGGUA CUGAUGAGGCCGUUAGGCCGAA ICCCUGGU | 1147 |
| 1447 | GGGCAUAC C UGUGGCCC | 438 | GGGCCACA CUGAUGAGGCCGUUAGGCCGAA IUAUGCCC | 1148 |
| 1448 | GGCAUACC U GUGGCCCC | 439 | GGGGCCAC CUGAUGAGGCCGUUAGGCCGAA IGUAUGCC | 1149 |
| 1454 | CCUGUGGC C CCCCACAC | 440 | GUGUGGGG CUGAUGAGGCCGUUAGGCCGAA ICCACAGG | 1150 |
| 1455 | CUGUGGCC C CCCACACA | 441 | UGUGUGGG CUGAUGAGGCCGUUAGGCCGAA IGCCACAG | 1151 |
| 1455 | UGUGGCCC C CCACACAA | 442 | UUGUGUGG CUGAUGAGGCCGUUAGGCCGAA IGGCCACA | 1152 |
| 1457 | GUGGCCCC C CACACAAC | 443 | GUUGUGUG CUGAUGAGGCCGUUAGGCCGAA IGGGCCAC | 1153 |
| 1458 | UGGCCCCC C ACACAACU | 444 | AGUUGUGU CUGAUGAGGCCGUUAGGCCGAA IGGGGCCA | 1154 |
| 1459 | GGCCCCCC A CACAACUG | 445 | CAGUUGUG CUGAUGAGGCCGUUAGGCCGAA IGGGGGCC | 1155 |
| 1461 | CCCCCCAC A CAACUGAG | 446 | CUCAGUUG CUGAUGAGGCCGUUAGGCCGAA IUGGGGGG | 1156 |
| 1463 | CCCCACAC A ACUGAGCC | 447 | GGCUCAGU CUGAUGAGGCCGUUAGGCCGAA IUGUGGGG | 1157 |
| 1466 | CACACAAC U GAGCCCAU | 448 | AUGGGCUC CUGAUGAGGCCGUUAGGCCGAA IUUGUGUG | 1158 |
| 1471 | AACUGAGC C CAUGCUGA | 449 | UCAGCAUG CUGAUGAGGCCGUUAGGCCGAA ICUCAGUU | 1159 |
| 1472 | ACUGAGCC C AUGCUGAU | 450 | AUCAGCAU CUGAUGAGGCCGUUAGGCCGAA IGCUCAGU | 1160 |
| 1473 | CUGAGCCC A UGCUGAUG | 451 | CAUCAGCA CUGAUGAGGCCGUUAGGCCGAA IGGCUCAG | 1161 |
| 1477 | GCCCAUGC U GAUGGAGU | 452 | ACUCCAUC CUGAUGAGGCCGUUAGGCCGAA ICAUGGGC | 1162 |
| 1488 | UGGAGUAC C CUGAGGCU | 453 | AGCCUCAG CUGAUGAGGCCGUUAGGCCGAA IUACUCCA | 1163 |
| 1489 | GGAGUACC C UGAGGCUA | 454 | UAGCCUCA CUGAUGAGGCCGUUAGGCCGAA IGUACUCC | 1164 |
| 1490 | GAGUACCC U GAGGCUAU | 455 | AUAGCCUC CUGAUGAGGCCGUUAGGCCGAA IGGUACUC | 1165 |
| 1496 | CCUGAGGC U AUAACUCG | 456 | CGAGUUAU CUGAUGAGGCCGUUAGGCCGAA ICCUCAGG | 1166 |
| 1502 | GCUAUAAC U CGCCUAGU | 457 | ACUAGGCG CUGAUGAGGCCGUUAGGCCGAA IUUAUAGC | 1167 |
| 1506 | UAACUCGC C UAGUGACA | 458 | UGUCACUA CUGAUGAGGCCGUUAGGCCGAA ICGAGUUA | 1168 |
| 1507 | AACUCGCC U AGUGACAG | 459 | CUGUCACU CUGAUGAGGCCGUUAGGCCGAA IGCGAGUU | 1169 |
| 1514 | CUAGUGAC A GCCCAGAG | 460 | CUCUGGGC CUGAUGAGGCCGUUAGGCCGAA IUCACUAG | 1170 |
| 1517 | GUGACAGC C CAGAGGCC | 461 | GGCCUCUG CUGAUGAGGCCGUUAGGCCGAA ICUGUCAC | 1171 |
| 1518 | UGACAGCC C AGAGGCCC | 462 | GGGCCUCU CUGAUGAGGCCGUUAGGCCGAA ICCUGUCA | 1172 |
| 1519 | GACAGCCC A GAGGCCCC | 463 | GGGGCCUC CUGAUGAGGCCGUUAGGCCGAA IGGCUGUC | 1173 |
| 1525 | CCAGAGGC C CCCCGACC | 464 | GGUCGGGG CUGAUGAGGCCGUUAGGCCGAA ICCUCUGG | 1174 |
| 1526 | CAGAGGCC C CCCGACCC | 465 | GGGUCGGG CUGAUGAGGCCGUUAGGCCGAA IGCCUCUG | 1175 |
| 1527 | AGAGGCCC C CCGACCCA | 466 | UGGGUCGG CUGAUGAGGCCGUUAGGCCGAA IGGCCUCU | 1176 |
| 1528 | GAGGCCCC C CGACCCAG | 467 | CUGGGUCG CUGAUGAGGCCGUUAGGCCGAA IGGGCCUC | 1177 |
| 1529 | AGGCCCCC C GACCCAGC | 468 | GCUGGGUC CUGAUGAGGCCGUUAGGCCGAA IGGGGCCU | 1178 |
| 1533 | CCCCCGAC C CAGCUCCU | 469 | AGGAGCUG CUGAUGAGGCCGUUAGGCCGAA IUCGGGGG | 1179 |
| 1534 | CCCCGACC C AGCUCCUG | 470 | CAGGAGCU CUGAUGAGGCCGUUAGGCCGAA IGUCGGGG | 1180 |
| 1535 | CCCGACCC A GCUCCUGC | 471 | GCAGGAGC CUGAUGAGGCCGUUAGGCCGAA IGGUCGGG | 1181 |
| 1538 | GACCCAGC U CCUGCUCC | 472 | GGAGCAGG CUGAUGAGGCCGUUAGGCCGAA ICUGGGUC | 1182 |
| 1540 | CCCAGCUC C UGCUCCAC | 473 | GUGGAGCA CUGAUGAGGCCGUUAGGCCGAA IAGCUGGG | 1183 |
| 1541 | CCAGCUCC U GCUCCACU | 474 | AGUGGAGC CUGAUGAGGCCGUUAGGCCGAA IGAGCUGG | 1184 |
| 1544 | GCUCCUGC U CCACUGGG | 475 | CCCAGUGG CUGAUGAGGCCGUUAGGCCGAA ICAGGAGC | 1185 |
| 1546 | UCCUGCUC C ACUGGGGG | 476 | CCCCCAGU CUGAUGAGGCCGUUAGGCCGAA IAGCAGGA | 1186 |
| 1547 | CCUGCUCC A CUGGGGGC | 477 | GCCCCCAG CUGAUGAGGCCGUUAGGCCGAA IGAGCAGG | 1187 |
| 1549 | UGCUCCAC U GGGGGCCC | 478 | GGGCCCCC CUGAUGAGGCCGUUAGGCCGAA IUGGAGCA | 1188 |
| 1556 | CUGGGGGC C CCGGGGCU | 479 | AGCCCCGG CUGAUGAGGCCGUUAGGCCGAA ICCCCCAG | 1189 |
| 1557 | UGGGGGCC C CGGGGCUC | 480 | GAGCCCCG CUGAUGAGGCCGUUAGGCCGAA IGCCCCCA | 1190 |
| 1558 | GGGGGCCC C GGGGCUCC | 481 | GGAGCCCC CUGAUGAGGCCGUUAGGCCGAA IGGCCCCC | 1191 |
| 1564 | CCCGGGGC U CCCCPAUG | 482 | CAUUGGGG CUGAUGAGGCCGUUAGGCCGAA ICCCCGGG | 1192 |
| 1566 | CGGGGCUC C CCAAUGGC | 483 | GCCAUUGG CUGAUGAGGCCGUUAGGCCGAA IAGCCCCG | 1193 |
| 1567 | GGGGCUCC C CAAUGGCC | 484 | GGCCAUUG CUGAUGAGGCCGUUAGGCCGAA IGAGCCCC | 1194 |
| 1568 | GGGCUCCC C AAUGGCCU | 485 | AGGCCAUU CUGAUGAGGCCGUUAGGCCGAA IGGAGCCC | 1195 |
| 1569 | GGCUCCCC A AUGGCCUC | 486 | GAGGCCAU CUGAUGAGGCCGUUAGGCCGAA IGGGAGCC | 1196 |
| 1575 | CCAAUGGC C UCCUUUCA | 487 | UGAAAGGA CUGAUGAGGCCGUUAGGCCGAA ICCAUUGG | 1197 |
| 1576 | CAAUGGCC U CCUUUCAG | 488 | CUGAAAGG CUGAUGAGGCCGUUAGGCCGAA IGCCAUUG | 1198 |
| 1578 | AUGOCCUC C UUUCAGGA | 489 | UCCUGAAA CUGAUGAGGCCGUUAGGCCGAA IAGGCCAU | 1199 |
| 1579 | UGGCCUCC U UUCAGGAG | 490 | CUCCUGAA CUGAUGAGGCCGUUAGGCCGAA IGAGCCCA | 1200 |
| 1583 | CUCCUUUC A GGAGAUGA | 491 | UCAUCUCC CUGAUGAGGCCGUUAGGCCGAA IAAAGGAG | 1201 |
| 1596 | AUGAAGAC U UCUCCUCC | 492 | GGAGGAGA CUGAUGAGGCCGUUAGGCCGAA IUCUUCAU | 1202 |
| 1599 | AAGACUUC U CCUCCAUU | 493 | AAUGGAGG CUGAUGAGGCCGUUAGGCCGAA IAAGUCUU | 1203 |
| 1601 | GACUUCUC C UCCAUUGC | 494 | GCAAUGGA CUGAUGAGGCCGUUAGGCCGAA IAGAAGUC | 1204 |
| 1602 | ACUUCUCC U CCAUUGCG | 495 | CGCAAUGG CUGAUGAGGCCGUUAGGCCGAA IGAGAAGU | 1205 |
| 1604 | UUCUCCUC C AUUGCGGA | 496 | UCCGCAAU CUGAUGAGGCCGUUAGGCCGAA IAGGAGAA | 1206 |
| 1605 | UCUCCUCC A UUGCGGAC | 497 | GUCCGCAA CUGAUGAGGCCGUUAGGCCGAA IGAGGAGA | 1207 |
| 1614 | UUGCGGAC A UGGACUUC | 498 | GAAGUCCA CUGAUGAGGCCGUUAGGCCGAA IUCCGCAA | 1208 |
| 1620 | ACAUGGAC U UCUCAGCC | 499 | GGCUGAGA CUGAUGAGGCCGUUAGGCCGAA IUCCAUGU | 1209 |
| 1623 | UGGACUUC U CAGCCCUG | 500 | CAGGGCUG CUGAUGAGGCCGUUAGGCCGAA IAAGUCCA | 1210 |
| 1625 | GACUUCUC A GCCCUGCU | 501 | AGCAGGGC CUGAUGAGGCCGUUAGGCCGAA IAGAAGUC | 1211 |
| 1628 | UUCUCAGC C CUGCUGAG | 502 | CUCAGCAG CUGAUGAGGCCGUUAGGCCGAA ICUGAGAA | 1212 |
| 1629 | UCUCAGCC C UGCUGAGU | 503 | ACUCAGCA CUGAUGAGGCCGUUAGGCCGAA IGCUGAGA | 1213 |
| 1630 | CUCAGCCC U GCUGAGUC | 504 | GACUCAGC CUGAUGAGGCCGUUAGGCCGAA IGGCUGAG | 1214 |
| 1633 | AGCCCUGC U GAGUCAGA | 505 | UCUGACUC CUGAUGAGGCCGUUAGGCCGAA ICAGGGCU | 1215 |
| 1639 | GCUGAGUC A GAUCAGCU | 506 | AGCUGAUC CUGAUGAGGCCGUUAGGCCGAA IACUCAGC | 1216 |
| 1644 | GUCAGAUC A GCUCCUAA | 507 | UUAGGAGC CUGAUGAGGCCGUUAGGCCGAA IAUCUGAC | 1217 |
| 1647 | AGAUCAGC U CCUAAGGG | 508 | CCCUUAGG CUGAUGAGGCCGUUAGGCCGAA ICUGAUCU | 1218 |
| 1649 | AUCAGCUC C UAAGGGGG | 509 | CCCCCUUA CUGAUGAGGCCGUUAGGCCGAA IAGCUGAU | 1219 |
| 1650 | UCAGCUCC U AAGGGGGU | 510 | ACCCCCUU CUGAUGAGGCCGUUAGGCCGAA IGAGCUGA | 1220 |
| 1664 | GGUGACGC C UGCCCUCC | 511 | GGAGGGCA CUGAUGAGGCCGUUAGGCCGAA ICGUCACC | 1221 |
| 1665 | GUGACGCC U GCCCUCCC | 512 | GGGAGGGC CUGAUGAGGCCGUUAGGCCGAA IGCGUCAC | 1222 |
| 1668 | ACGCCUGC C CUCCCCAG | 513 | CUGGGGAG CUGAUGAGGCCGUUAGGCCGAA ICAGGCGU | 1223 |
| 1669 | CGCCUGCC C UCCCCAGA | 514 | UCUGGGGA CUGAUGAGGCCGUUAGGCCGAA IGCAGGCG | 1224 |
| 1670 | GCCUGCCC U CCCCAGAG | 515 | CUCUGGGG CUGAUGAGGCCGUUAGGCCGAA IGGCAGGC | 1225 |
| 1672 | CUGCCCUC C CCAGAGCA | 516 | UGCUCUGG CUGAUGAGGCCGUUAGGCCGAA IAGGGCAG | 1226 |
| 1673 | UGCCCUCC C CAGAGCAC | 517 | GUGCUCUG CUGAUGAGGCCGUUAGGCCGAA IGAGGGCA | 1227 |
| 1674 | GCCCUCCC C AGAGCACU | 518 | AGUGCUCU CUGAUGAGGCCGUUAGGCCGAA IGGAGGGC | 1228 |
| 1675 | CCCUCCCC A GAGCACUG | 519 | CAGUGCUC CUGAUGAGGCCGUUAGGCCGAA IGGGAGGG | 1229 |
| 1680 | CCCAGAGC A CUGGUUGC | 520 | GCAACCAG CUGAUGAGGCCGUUAGGCCGAA ICUCUGGG | 1230 |
| 1682 | CAGAGCAC U GGUUGCAG | 521 | CUGCAACC CUGAUGAGGCCGUUAGGCCGAA IUGCUCUG | 1231 |
| 1689 | CUGGUUGC A GGGGAUUG | 522 | CAAUCCCC CUGAUGAGGCCGUUAGGCCGAA ICAACCAG | 1232 |
| 1702 | AUUGAAGC C CUCCAAAA | 523 | UUUUGGAG CUGAUGAGGCCGUUAGGCCGAA ICUUCAAU | 1233 |
| 1703 | UUGAAGCC C UCCAAAAG | 524 | CUUUUGGA CUGAUGAGGCCGUUAGGCCGAA IGCUUCAA | 1234 |
| 1704 | UGAAGCCC U CCAAAAGC | 525 | GCUUUUGG CUGAUGAGGCCGUUAGGCCGAA IGGCUUCA | 1235 |
| 1706 | AAGCCCUC C AAAAGCAC | 526 | GUGCUUUU CUGAUGAGGCCGUUAGGCCGAA IAGGGCUU | 1236 |
| 1707 | AGCCCUCC A AAAGCACU | 527 | AGUGCUUU CUGAUGAGGCCGUUAGGCCGAA IGAGGGCU | 1237 |
| 1713 | CCAAAAGC A CUUACGGA | 528 | UCCGUAAG CUGAUGAGGCCGUUAGGCCGAA ICUUUUGG | 1238 |
| 1715 | AAAAGCAC U UACGGAUU | 529 | AAUCCGUA CUGAUGAGGCCGUUAGGCCGAA IUGCUUUU | 1239 |
| 1725 | ACGGAUUC U GGUGGGGU | 530 | ACCCCACC CUGAUGAGGCCGUUAGGCCGAA IAAUCCGU | 1240 |
| 1740 | GUGUGUUC C AACUGCCC | 531 | GGGCAGUU CUGAUGAGGCCGUUAGGCCGAA IAACACAC | 1241 |
| 1741 | UGUGUUCC A ACUGCCCC | 532 | GGGGCAGU CUGAUGAGGCCGUUAGGCCGAA IGAACACA | 1242 |
| 1744 | GUUCCAAC U GCCCCCAA | 533 | UUGGGGGC CUGAUGAGGCCGUUAGGCCGAA IUUGGAAC | 1243 |
| 1747 | CCAACUGC C CCCAACUU | 534 | AAGUUGGG CUGAUGAGGCCGUUAGGCCGAA ICAGUUGG | 1244 |
| 1748 | CAACUGCC C CCAACUUU | 535 | AAAGUUGG CUGAUGAGGCCGUUAGGCCGAA IGCAGUUG | 1245 |
| 1749 | AACUGCCC C CAACUUUG | 536 | CAAAGUUG CUGAUGAGGCCGUUAGGCCGAA IGGCAGUU | 1246 |
| 1750 | ACUGCCCC C AACUUUGU | 537 | ACAAAGUU CUGAUGAGGCCGUUAGGCCGAA IGGGCAGU | 1247 |
| 1751 | CUGCCCCC A ACUUUGUG | 538 | CACAAAGU CUGAUGAGGCCGUUAGGCCGAA IGGGGCAG | 1248 |
| 1754 | CCCCCAAC U UUGUGGAU | 539 | AUCCACAA CUGAUGAGGCCGUUAGGCCGAA IUUGGGGG | 1249 |
| 1766 | UGGAUGUC U UCCUUGGA | 540 | UCCAAGGA CUGAUGAGGCCGUUAGGCCGAA IACAUCCA | 1250 |
| 1769 | AUGUCUUC C UUGGAGGG | 541 | CCCUCCAA CUGAUGAGGCCGUUAGGCCGAA IAAGACAU | 1251 |
| 1770 | UGUCUUCC U UGGAGGGG | 542 | CCCCUCCA CUGAUGAGGCCGUUAGGCCGAA IGAAGACA | 1252 |
| 1784 | GGGGGAGC C AUAUUUUA | 543 | UAAAAUAU CUGAUGAGGCCGUUAGGCCGAA ICUCCCCC | 1253 |
| 1785 | GGGGAGCC A UAUUUUAU | 544 | AUAAAAUA CUGAUGAGGCCGUUAGGCCGAA IGCUCCCC | 1254 |
| 1796 | UUUUAUUC U UUUAUUGU | 545 | ACAAUAAA CUGAUGAGGCCGUUAGGCCGAA IAAUAAAA | 1255 |
| 1806 | UUAUUGUC A GUAUCUGU | 546 | ACAGAUAC CUGAUGAGGCCGUUAGGCCGAA IACAAUAA | 1256 |
| 1812 | UCAGUAUC U GUAUCUCU | 547 | AGAGAUAC CUGAUGAGGCCGUUAGGCCGAA IAUACUGA | 1257 |
| 1818 | UCUGUAUC U CUCUCUCU | 548 | AGAGAGAG CUGAUGAGGCCGUUAGGCCGAA IAUACAGA | 1258 |
| 1820 | UGUAUCUC U CUCUCUUU | 549 | AAAGAGAG CUGAUGAGGCCGUUAGGCCGAA IAGAUACA | 1259 |
| 1822 | UAUCUCUC U CUCUUUUU | 550 | AAAAAGAG CUGAUGAGGCCGUUAGGCCGAA IAGAGAUA | 1260 |
| 1824 | UCUCUCUC U CUUUUUGG | 551 | CCAAAAAG CUGAUGAGGCCGUUAGGCCGAA IAGAGAGA | 1261 |
| 1826 | UCUCUCUC U UUUUGGAG | 552 | CUCCAAAA CUGAUGAGGCCGUUAGGCCGAA IAGAGAGA | 1262 |
| 1839 | GGAGGUGC U UAAGCAGA | 553 | UCUGCUUA CUGAUGAGGCCGUUAGGCCGAA ICACCUCC | 1263 |
| 1845 | GCUUAAGC A GAAGCAUU | 554 | AAUGCUUC CUGAUGAGGCCGUUAGGCCGAA ICUUAAGC | 1264 |
| 1851 | GCAGAAGC A UUAACUUC | 555 | GAAGUUAA CUGAUGAGGCCGUUAGGCCGAA ICUUCUGC | 1265 |
| 1857 | GCAUUAAC U UCUCUGGA | 556 | UCCAGAGA CUGAUGAGGCCGUUAGGCCGAA IUUAAUGC | 1266 |
| 1860 | UUAACUUC U CUGGAAAG | 557 | CUUUCCAG CUGAUGAGGCCGUUAGGCCGAA IAAGUUAA | 1267 |
| 1862 | AACUUCUC U GGAAAGGG | 558 | CCCUUUCC CUGAUGAGGCCGUUAGGCCGAA IAGAAGUU | 1268 |
| 1877 | GGGGGAGC U GGGGAAAC | 559 | GUUUCCCC CUGAUGAGGCCGUUAGGCCGAA ICUCCCCC | 1269 |
| 1886 | GGGGAAAC U CAAACUUU | 560 | AAAGUUUG CUGAUGAGGCCGUUAGGCCGAA IUUUCCCC | 1270 |
| 1888 | GGAAACUC A AACUUUUC | 561 | GAAAAGUU CUGAUGAGGCCGUUAGGCCGAA IAGUUUCC | 1271 |
| 1892 | ACUCAAAC U UUUCCCCU | 562 | AGGGGAAA CUGAUGAGGCCGUUAGGCCGAA IUUUGAGU | 1272 |
| 1897 | AACUUUUC C CCUGUCCU | 563 | AGGACAGG CUGAUGAGGCCGUUAGGCCGAA IAAAAGUU | 1273 |
| 1898 | ACUUUUCC C CUGUCCUG | 564 | CAGGACAG CUGAUGAGGCCGUUAGGCCGAA IGAAAAGU | 1274 |
| 1899 | CUUUUCCC C UGUCCUGA | 565 | UCAGGACA CUGAUGAGGCCGUUAGGCCGAA IGGAAAAG | 1275 |
| 1900 | UUUUCCCC U GUCCUGAU | 566 | AUCAGGAC CUGAUGAGGCCGUUAGGCCGAA IGGGAAAA | 1276 |
| 1904 | CCCCUGUC C UGAUGGUC | 567 | GACCAUCA CUGAUGAGGCCGUUAGGCCGAA IACAGGGG | 1277 |
| 1905 | CCCUGUCC U GAUGGUCA | 568 | UGACCAUC CUGAUGAGGCCGUUAGGCCGAA IGACAGGG | 1278 |
| 1913 | UGAUGGUC A GCUCCCUU | 569 | AAGGGAGC CUGAUGAGGCCGUUAGGCCGAA IACCAUCA | 1279 |
| 1916 | UGGUCAUC U CCCUUCUC | 570 | GAGAAGGG CUGAUGAGGCCGUUAGGCCGAA ICUGACCA | 1280 |
| 1918 | GUCAGCUC C CUUCUCUG | 571 | CAGAGAAG CUGAUGAGGCCGUUAGGCCGAA IAGCUGAC | 1281 |
| 1919 | UCAGCUCC C UUCUCUGU | 572 | ACAGAGAA CUGAUGAGGCCGUUAGGCCGAA IGAGCUGA | 1282 |
| 1920 | CAGCUCCC U UCUCUGUA | 573 | UACAGAGA CUGAUGAGGCCGUUAGGCCGAA IGGAGCUG | 1283 |
| 1923 | CUCCCUUC U CUGUAGGG | 574 | CCCUACAG CUGAUGAGGCCGUUAGGCCGAA IAAGGGAG | 1284 |
| 1925 | CCCUUCUC U GUAGGGAA | 575 | UUCCCUAC CUGAUGAGGCCGUUAGGCCGAA IAGAAGGG | 1285 |
| 1935 | UAGGGAAC U GUGGGGUC | 576 | GACCCCAC CUGAUGAGGCCGUUAGGCCGAA IUUCCCUA | 1286 |
| 1944 | GUGGGGUC C CCCAUCCC | 577 | GGGAUGGG CUGAUGAGGCCGUUAGGCCGAA IACCCCAC | 1287 |
| 1945 | UGGGGUCC C CCAUCCCC | 578 | GGGGAUGG CUGAUGAGGCCGUUAGGCCGAA IGACCCCA | 1288 |
| 1946 | GGGGUCCC C CAUCCCCA | 579 | UGGGGAUG CUGAUGAGGCCGUUAGGCCGAA IGGACCCC | 1289 |
| 1947 | GGGUCCCC C AUCCCCAU | 580 | AUGGGGAU CUGAUGAGGCCGUUAGGCCGAA IGGGACCC | 1290 |
| 1948 | GGUCCCCC A UCCCCAUC | 581 | GAUGGGGA CUGAUGAGGCCGUUAGGCCGAA IGGGGACC | 1291 |
| 1951 | CCCCCAUC C CCAUCCUC | 582 | GAGGAUGG CUGAUGAGGCCGUUAGGCCGAA IAUGGGGG | 1292 |
| 1952 | CCCCAUCC C CAUCCUCC | 583 | GGAGGAUG CUGAUGAGGCCGUUAGGCCGAA IGAUGGGG | 1293 |
| 1953 | CCCAUCCC C AUCCUCCA | 584 | UGGAGGAU CUGAUGAGGCCGUUAGGCCGAA IGGAUGGG | 1294 |
| 1954 | CCAUCCCC A UCCUCCAG | 585 | CUGGAGGA CUGAUGAGGCCGUUAGGCCGAA IGGGAUGG | 1295 |
| 1957 | UCCCCAUC C UCCAGCUU | 586 | AGCUGGAA CUGAUGAGGCCGUUAGGCCGAA IAUGGGGA | 1296 |
| 1958 | CCCCAUCC U CCAGCUUC | 587 | GAAGCUGG CUGAUGAGGCCGUUAGGCCGAA IGAUGGGG | 1297 |
| 1960 | CCAUCCUC C AGCUUCUG | 588 | CAGAAGCU CUGAUGAGGCCGUUAGGCCGAA IAGGAUGG | 1298 |
| 1961 | CAUCCUCC A GCUUCUGG | 589 | CCAGAAGC CUGAUGAGGCCGUUAGGCCGAA IGAGGAUG | 1299 |
| 1964 | CCUCCAGC U UCUGGUAC | 590 | GUACCAGA CUGAUGAGGCCGUUAGGCCGAA ICUGGAGG | 1300 |
| 1967 | CCAGCUUC U GGUACUCU | 591 | AGAGUACC CUGAUGAGGCCGUUAGGCCGAA IAAGCUGG | 1301 |
| 1973 | UCUGGUAC U CUCCUAGA | 592 | UCUAGGAG CUGAUGAGGCCGUUAGGCCGAA IUACCAGA | 1302 |
| 1975 | UGGUACUC U CCUAGAGA | 593 | UCUCUAGG CUGAUGAGGCCGUUAGGCCGAA IAGUACCA | 1303 |
| 1977 | GUACUCUC C UAGAGACA | 594 | UGUCUCUA CUGAUGAGGCCGUUAGGCCGAA IAGAGUAC | 1304 |
| 1978 | UACUCUCC U AGAGACAG | 595 | CUGUCUCU CUGAUGAGGCCGUUAGGCCGAA IGAGAGUA | 1305 |
| 1985 | CUAGAGAC A GAAGCAGG | 596 | CCUGCUUC CUGAUGAGGCCGUUAGGCCGAA IUCUCUAG | 1306 |
| 1991 | ACAGAAGC A GGCUGGAG | 597 | CUCCAGCC CUGAUGAGGCCGUUAGGCCGAA ICUUCUGU | 1307 |
| 1995 | AAGCAGGC U GGAGGUAA | 598 | UUACCUCC CUGAUGAGGCCGUUAGGCCGAA ICCUGCUU | 1308 |
| 2007 | GGUAAGGC C UUUGAGCC | 599 | GGCUCAAA CUGAUGAGGCCGUUAGGCCGAA ICCUUACC | 1309 |
| 2008 | GUAAGGCC U UUGAGCCC | 600 | GGGCUCAA CUGAUGAGGCCGUUAGGCCGAA IGCCUUAC | 1310 |
| 2015 | CUUUGAGC C CACAAAGC | 601 | GCUUUGUG CUGAUGAGGCCGUUAGGCCGAA ICUCAAAG | 1311 |
| 2016 | UUUGAGCC C ACAAAGCC | 602 | GGCUUUGU CUGAUGAGGCCGUUAGGCCGAA IGCUCAAA | 1312 |
| 2017 | UUGAGCCC A CAAAGCCU | 603 | AGGCUUUG CUGAUGAGGCCGUUAGGCCGAA IGGCUCAA | 1313 |
| 2019 | GAGCCCAC A AAGCCUUA | 604 | UAAGGCUU CUGAUGAGGCCGUUAGGCCGAA IUGGGCUC | 1314 |
| 2024 | CACAAAGC C UUAUCAAG | 605 | CUUGAUAA CUGAUGAGGCCGUUAGGCCGAA ICUCUGUG | 1315 |
| 2025 | ACAAAGCC U UAUCAAGU | 606 | ACUUGAUA CUGAUGAGGCCGUUAGGCCGAA IGCUUUGU | 1316 |
| 2030 | GCCUUAUC A AGUGUCUU | 607 | AAGACACU CUGAUGAGGCCGUUAGGCCGAA IAUAAGGC | 1317 |
| 2037 | CAAGUGUC U UCCAUCAU | 608 | AUGAUGGA CUGAUGAGGCCGUUAGGCCGAA IACACUUG | 1318 |
| 2040 | GUGUCUUC C AUCAUGGA | 609 | UCCAUGAU CUGAUGAGGCCGUUAGGCCGAA IAAGACAC | 1319 |
| 2041 | UGUCUUCC A UCAUGGAU | 610 | AUCCAUGA CUGAUGAGGCCGUUAGGCCGAA IGAAGACA | 1320 |
| 2044 | CUUCCAUC A UGGAUUCA | 611 | UGAAUCCA CUGAUGAGGCCGUUAGGCCGAA IAUGGAAG | 1321 |
| 2052 | AUGGAUUC A UUACAGCU | 612 | AGCUGUAA CUGAUGAGGCCGUUAGGCCGAA IAAUCCAU | 1322 |
| 2057 | UUCAUUAC A GCUUAAUC | 613 | GAUUAAGC CUGAUGAGGCCGUUAGGCCGAA IUAAUGAA | 1323 |
| 2060 | AUUACAGC U UAAUCAAA | 614 | UUUGAUUA CUGAUGAGGCCGUUAGGCCGAA ICUGUAAU | 1324 |
| 2066 | GCUUAAUC A AAAUAACG | 615 | CGUUAUUU CUGAUGAGGCCGUUAGGCCGAA IAUUAAGC | 1325 |
| 2076 | AAUAACGC C CCAGAUAC | 616 | GUAUCUGG CUGAUGAGGCCGUUAGGCCGAA ICGUUAUU | 1326 |
| 2077 | AUAACGCC C CAGAUACC | 617 | GGUAUCUG CUGAUGAGGCCGUUAGGCCGAA IGCGUUAU | 1327 |
| 2078 | UAACGCCC C AGAUACCA | 618 | UGGUAUCU CUGAUGAGGCCGUUAGGCCGAA IGGCGUUA | 1328 |
| 2079 | AACGCCCC A GAUACCAG | 619 | CUGGUAUC CUGAUGAGGCCGUUAGGCCGAA IGGGCGUU | 1329 |
| 2085 | CCAGAUAC C AGCCCCUG | 620 | CAGGGGCU CUGAUGAGGCCGUUAGGCCGAA IUAUCUGG | 1330 |
| 2086 | CAGAUACC A GCCCCUGU | 621 | ACAGGGGC CUGAUGAGGCCGUUAGGCCGAA IGUAUCUG | 1331 |
| 2089 | AUACCAGC C CCUGUAUG | 622 | CAUACAGG CUGAUGAGGCCGUUAGGCCGAA ICUGGUAU | 1332 |
| 2090 | UACCAGCC C CUGUAUGG | 623 | CCAUACAG CUGAUGAGGCCGUUAGGCCGAA IGCUGGUA | 1333 |
| 2091 | ACCAGCCC C UGUAUGGC | 624 | GCCAUACA CUGAUGAGGCCGUUAGGCCGAA IGGCUGGU | 1334 |
| 2092 | CCAGCCCC U GUAUGGCA | 625 | UGCCAUAC CUGAUGAGGCCGUUAGGCCGAA IGGGCUGG | 1335 |
| 2100 | UGUAUGGC A CUGGCAUU | 626 | AAUGCCAG CUGAUGAGGCCGUUAGGCCGAA ICCAUACA | 1336 |
| 2102 | UAUGGCAC U GGCAUUGU | 627 | ACAAUGCC CUGAUGAGGCCGUUAGGCCGAA IUGCCAUA | 1337 |
| 2106 | GCACUGGC A UUGUCCCU | 628 | AGGGACAA CUGAUGAGGCCGUUAGGCCGAA ICCAGUGC | 1338 |
| 2112 | GCAUUGUC C CUGUGCCU | 629 | AGGCACAG CUGAUGAGGCCGUUAGGCCGAA IACAAUGC | 1339 |
| 2113 | CAUUGUCC C UGUGCCUA | 630 | UAGGCACA CUGAUGAGGCCGUUAGGCCGAA IGACAAUG | 1340 |
| 2114 | AUUGUCCC U GUGCCUAA | 631 | UUAGGCAC CUGAUGAGGCCGUUAGGCCGAA IGGACAAU | 1341 |
| 2119 | CCCUGUGC C UAACACCA | 632 | UGGUGUUA CUGAUGAGGCCGUUAGGCCGAA ICACAGGG | 1342 |
| 2120 | CCUGUGCC U AACACCAG | 633 | CUGGUGUU CUGAUGAGGCCGUUAGGCCGAA IGCACAGG | 1343 |
| 2124 | UGCCUAAC A CCAGCGUU | 634 | AACGCUGG CUGAUGAGGCCGUUAGGCCGAA IUUAGGCA | 1344 |
| 2126 | CCUAACAC C AGCGUUUG | 635 | CAAACGCU CUGAUGAGGCCGUUAGGCCGAA IUGUUAGG | 1345 |
| 2127 | CUAACACC A GCGUUUGA | 636 | UCAAACGC CUGAUGAGGCCGUUAGGCCGAA IGUGUUAG | 1346 |
| 2141 | UGAGGGGC U GCCUUCCU | 637 | AGGAAGGC CUGAUGAGGCCGUUAGGCCGAA ICCCCUCA | 1347 |
| 2144 | GGGGCUGC C UUCCUGCC | 638 | GGCAGGAA CUGAUGAGGCCGUUAGGCCGAA ICAGCCCC | 1348 |
| 2145 | GGGCUGCC U UCCUGCCC | 639 | GGGCAGGA CUGAUGAGGCCGUUAGGCCGAA IGCAGCCC | 1349 |
| 2148 | CUGCCUUC C UGCCCUAC | 640 | GUAGGGCA CUGAUGAGGCCGUUAGGCCGAA IAAGGCAG | 1350 |
| 2149 | UGCCUUCC U GCCCUACA | 641 | UGUAGGGC CUGAUGAGGCCGUUAGGCCGAA IGAAGGCA | 1351 |
| 2152 | CUUCCUGC C CUACAGAG | 642 | CUCUGUAG CUGAUGAGGCCGUUAGGCCGAA ICAGGAAG | 1352 |
| 2153 | UUCCUGCC C UACAGAGG | 643 | CCUCUGUA CUGAUGAGGCCGUUAGGCCGAA IGCAGGAA | 1353 |
| 2154 | UCCUGCCC U ACAGAGGU | 644 | ACCUCUGU CUGAUGAGGCCGUUAGGCCGAA IGGCAGGA | 1354 |
| 2157 | UGCCCUAC A GAGGUCUC | 645 | GAGACCUC CUGAUGAGGCCGUUAGGCCGAA IUAGGGCA | 1355 |
| 2164 | CAGAGGUC U CUGCCGGC | 646 | GCCGGCAG CUGAUGAGGCCGUUAGGCCGAA IACCUCUG | 1356 |
| 2166 | GAGGUCUC U GCCGGCUC | 647 | GAGCCGGC CUGAUGAGGCCGUUAGGCCGAA IAGACCUC | 1357 |
| 2169 | GUCUCUGC C GGCUCUUU | 648 | AAAGAGCC CUGAUGAGGCCGUUAGGCCGAA ICAGAGAC | 1358 |
| 2173 | CUGCCGGC U CUUUCCUU | 649 | AAGGAAAG CUGAUGAGGCCGUUAGGCCGAA ICCGGCAG | 1359 |
| 2175 | GCCGGCUC U UUCCUUGC | 650 | GCAAGGAA CUGAUGAGGCCGUUAGGCCGAA IAGCCGGC | 1360 |
| 2179 | GCUCUUUC C UUGCUCAA | 651 | UUGAGCAA CUGAUGAGGCCGUUAGGCCGAA IAAAGAGC | 1361 |
| 2180 | CUCUUUCC U UGCUCAAC | 652 | GUUGAGCA CUGAUGAGGCCGUUAGGCCGAA IGAAAGAG | 1362 |
| 2184 | UUCCUUGC U CAACCAUG | 653 | CAUGGUUG CUGAUGAGGCCGUUAGGCCGAA ICAAGGAA | 1363 |
| 2186 | CCUUGCUC A ACCAUGGC | 654 | GCCAUGGU CUGAUGAGGCCGUUAGGCCGAA IAGCAAGG | 1364 |
| 2189 | UGCUCAAC C AUGGCUGA | 655 | UCAGCCAU CUGAUGAGGCCGUUAGGCCGAA IUUGAGCA | 1365 |
| 2190 | GCUCAACC A UGGCUGAA | 656 | UUCAGCCA CUGAUGAGGCCGUUAGGCCGAA IGUUGAGC | 1366 |
| 2195 | ACCAUGGC U GAAGGAAA | 657 | UUUCCUUC CUGAUGAGGCCGUUAGGCCGAA ICCAUGGU | 1367 |
| 2205 | AAGGAAAC A GUGCAACA | 658 | UGUUGCAC CUGAUGAGGCCGUUAGGCCGAA IUUUCCUU | 1368 |
| 2210 | AACAGUGC A ACAGCACU | 659 | AGUGCUGU CUGAUGAGGCCGUUAGGCCGAA ICACUGUU | 1369 |
| 2213 | AGUGCAAC A GCACUGGC | 660 | GCCAGUGC CUGAUGAGGCCGUUAGGCCGAA IUUGCACU | 1370 |
| 2216 | GCAACAGC A CUGGCUCU | 661 | AGAGCCAG CUCAUGAGGCCGUUAGGCCGAA ICUGUUGC | 1371 |
| 2218 | AACAGCAC U GGCUCUCU | 662 | AGAGAGCC CUGAUGAGGCCGUUAGGCCGAA IUGCUGUU | 1372 |
| 2222 | GCACUGGC U CUCUCCAG | 663 | CUGGAGAG CUGAUGAGGCCGUUAGGCCGAA ICCAGUOC | 1373 |
| 2224 | ACUGGCUC U CUCCAGGA | 664 | UCCUGGAG CUGAUGAGGCCGUUAGGCCGAA IAGCCAGU | 1374 |
| 2226 | UGGCUCUC U CCAGGAUC | 663 | GAUCCUGG CUGAUGAGGCCGUUAGGCCGAA IAGAGCCA | 1375 |
| 2228 | GCUCUCUC C AGGAUCCA | 666 | UGGAUCCU CUGAUGAGGCCGUUAGGCCGAA IAGAGAGC | 1376 |
| 2229 | CUCUCUCC A GGAUCCAG | 667 | CUGGAUCC CUGAUGAGGCCGUUAGGCCGAA IGAGAGAG | 1377 |
| 2235 | CCAGGAUC C AGAAGGGG | 668 | CCCCUUCU CUGAUGAGGCCGUUAGGCCGAA IAUCCUGG | 1378 |
| 2236 | CAGGAUCC A GAAGGGGU | 669 | ACCCCUUC CUGAUGAGGCCGUUAGGCCGAA IGAUCCUG | 1379 |
| 2251 | GUUUGGUC U GGACUUCC | 670 | GGAAGUCC CUGAUGAGGCCGUUAGGCCGAA IACCAAAC | 1380 |
| 2256 | GUCUGGAC U UCCUUGCU | 671 | AGCAAGGA CUGAUGAGGCCGUUAGGCCGAA IUCCAGAC | 1381 |
| 2259 | UGGACUUC C UUGCUCUC | 672 | GAGAGCAA CUGAUGAGGCCGUUAGGCCGAA IAAGUCCA | 1382 |
| 2260 | GGACUUCC U UGCUCUCC | 673 | GGAGAGCA CUGAUGAGGCCGUUAGGCCGAA IGAAGUCC | 1383 |
| 2264 | UUCCUUGC U CUCCCCUC | 674 | GAGGGGAC CUGAUGAGGCCGUUAGGCCGAA ICAAGGAA | 1384 |
| 2266 | CCUUGCUC U CCCCUCUU | 675 | AAGAGGGG CUGAUGAGGCCGUUAGGCCGAA IAGCAAGG | 1385 |
| 2268 | UUGCUCUC C CCUCUUCU | 676 | AGAAGAGG CUGAUGAGGCCGUUAGGCCGAA IAGAGCAA | 1386 |
| 2269 | UGCUCUCC C CUCUUCUC | 677 | GAGAAGAG CUGAUGAGGCCGUUAGGCCGAA IGAGAGCA | 1387 |
| 2270 | GCUCUCCC C UCUUCUCA | 678 | UGAGAAGA CUGAUGAGGCCGUUAGGCCGAA IGGAGAGC | 1388 |
| 2271 | CUCUCCCC U CUUCUCAA | 679 | UUGAGAAG CUGAUGAGGCCGUUAGGCCGAA IGGGAGAG | 1389 |
| 2273 | CUCCCCUC U UCUCAAGU | 680 | ACUUGAGA CUGAUGAGGCCGUUAGGCCGAA IAGGGGAG | 1390 |
| 2276 | CCCUCUUC U CAAGUGCC | 681 | GGCACUUG CUGAUGAGGCCGUUAGGCCGAA IAAGAGGG | 1391 |
| 2278 | CUCUUCUC A AGUGCCUU | 682 | AACGCACU CUGAUGAGGCCGUUAGGCCGAA IAGAAGAG | 1392 |
| 2284 | UCAAGUGC C UUAAUAGU | 683 | ACUAUUAA CUGAUGAGGCCGUUAGGCCGAA ICACUUGA | 1393 |
| 2285 | CAAGUGCC U UAAUAGUA | 684 | UACUAUUA CUGAUGAGGCCGUUAGGCCGAA IGCACUUG | 1394 |
| 2322 | GGGAGAGC A GGCUGGCA | 685 | UGCCAGCC CUGAUGAGGCCGUUAGGCCGAA ICUCUCCC | 1395 |
| 2326 | GAGCAGGC U GGCAGCUC | 686 | GAGCUGCC CUGAUGAGGCCGUUAGGCCGAA ICCUGCUC | 1396 |
| 2330 | AGGCUGGC A GCUCUCCA | 687 | UGGAGAGC CUGAUGAGGCCGUUAGGCCGAA ICCAGCCU | 1397 |
| 2333 | CUGGCAGC U CUCCAGUC | 688 | GACUGGAG CUGAUGAGGCCGUUAGGCCGAA ICUGCCAG | 1398 |
| 2335 | GGCAGCUC U CCAGUCAG | 689 | CUGACUGO CUGAUGAGGCCGUUAGGCCGAA IAGCUGCC | 1399 |
| 2337 | CAGCUCUC C AGUCAGGA | 690 | UCCUGACU CUGAUGAGGCCGUUAGGCCGAA IAGAGCUG | 1400 |
| 2338 | AGCUCUCC A GUCACGAG | 691 | CUCCUGAC CUGAUGAGGCCGUUAGGCCGAA IGAGAGCU | 1401 |
| 2342 | CUCCAGUC A GGAGGCAU | 692 | AUGCCUCC CUGAUGAGGCCGUUAGGCCGAA IACUGGAG | 1402 |
| 2349 | CAGGAGCC A UAGUUUUU | 693 | AAAAACUA CUGAUGAGGCCGUUAGGCCGAA ICCUCCUG | 1403 |
| 2365 | UAGUGAAC A AUCAAAGC | 694 | GCUUUGAU CUGAUGAGGCCGUUAGGCCGAA IUUCACUA | 1404 |
| 2369 | GAACAAUC A AAGCACUU | 695 | AAGUGCUU CUGAUGAGGCCGUUAGGCCGAA IAUUGUUC | 1405 |
| 2374 | AUCAAAGC A CUUGGACU | 696 | AGUCCAAG CUGAUGAGGCCGUUAGGCCGAA ICUUUGAU | 1406 |
| 2376 | CAAAGCAC U UGGACUCU | 697 | AGAGUCCA CUGAUGAGGCCGUUAGGCCGAA IUGCUUUG | 1407 |
| 2382 | ACUUGGAC U CUUGCUCU | 698 | AGAGCAAG CUGAUGAGGCCGUUAGGCCGAA IUCCAAGU | 1408 |
| 2384 | UUGGACUC U UGCUCUUU | 699 | AAAGAGCA CUGAUGAGGCCGUUAGGCCGAA IAGUCCAA | 1409 |
| 2388 | ACUCUUGC U CUUUCUAC | 700 | GUAGAAAG CUGAUGAGGCCGUUAGGCCGAA ICAAGAGU | 1410 |
| 2390 | UCUUGCUC U UUCUACUC | 701 | GAGUAGAA CUGAUGAGGCCGUUAGGCCGAA IAGCAAGA | 1411 |
| 2394 | GCUCUUUC U ACUCUGAA | 702 | UUCAGAGU CUGAUGAGGCCGUUAGGCCGAA IAAAGAGC | 1412 |
| 2397 | CUUUCUAC U CUGAACUA | 703 | UAGUUCAG CUGAUGAGGCCGUUAGGCCGAA IUAGAAAG | 1413 |
| 2399 | UUCUACUC U GAACUAAU | 704 | AUUAGUUC CUGAUGAGGCCGUUAGGCCGAA IAGUAGAA | 1414 |
| 2404 | CUCUGAAC U AAUAAAGC | 705 | GCUUUAUU CUGAUGAGGCCGUUAGGCCGAA IUUCAGAG | 1415 |
| 2413 | AAUAAAGC U GUUGCCAA | 706 | UUGGCAAC CUGAUGAGGCCGUUAGGCCGAA ICUUUAUU | 1416 |
| 2419 | GCUGUUGC C AAGCUGGA | 707 | UCCAGCUU CUGAUGAGGCCGUUAGGCCGAA ICAACAGC | 1417 |
| 2420 | CUGUUGCC A AGCUGGAC | 708 | GUCCAGCU CUGAUGAGGCCGUUAGGCCGAA IGCAACAG | 1418 |
| 2424 | UGCCAAGC U GGACGGCA | 709 | UGCCGUCC CUGAUGAGGCCGUUAGGCCGAA ICUUGGCA | 1419 |
| 2432 | UGGACGGC A CGAGCUCG | 710 | CGAGCUCG CUGAUGAGGCCGUUAGGCCGAA ICCGUCCA | 1420 |

Input Sequence = NM_021975. Cut Site = CH/.
Arm Length = 8. Core Sequence = CUGAUGAG GCCGUUAGGC CGAA
NM_021975 (Homo sapiens p65 RelA (NFKB), mRNA; 2444 bp)

[0259] TABLE IV
Human REL-A Zinzyme and Substrate Sequence

| | | Seq | | Seq |
|---|---|---|---|---|
| Pos | Substrate | ID | Zinzyme | ID |
| 9 | GGCACGAG G CGGGGCCG | 1421 | CGGCCCCG GCCGAAAGGCGAGUGAGGUCU CUCGUGCC | 1717 |
| 14 | GAGGCGGG G CCGGGUCG | 1422 | CGACCCGG GCCGAAAGGCGAGUGAGGUCU CCCGCCUC | 1718 |
| 19 | GGGGCCGG G UCGCAGCU | 1423 | AGCUGCGA GCCGAAAGGCGAGUGAGGUCU CCGGCCCC | 1719 |
| 22 | GCCGGGUC G CAGCUGGG | 1424 | CCCAGCUG GCCGAAAGGCGAGUGAGGUCU GACCCGGC | 1720 |
| 25 | GGGUCGCA G CUGGGCCC | 1425 | GGCCCCAG GCCGAAAGGCGAGUGAGGUCU UGCGACCC | 1721 |
| 30 | GCAGCUGG G CCCGCGGC | 1426 | GCCGCGGG GCCGAAAGGCGAGUGAGGUCU CCAGCUGC | 1722 |
| 34 | CUGGGCCC G CGGCAUGG | 1427 | CCAUGCCG GCCGAAAGGCGAGUGAGGUCU GGGCCCAG | 1723 |
| 37 | GGCCCGCG G CAUGGACG | 1428 | CGUCCAUG GCCGAAAGGCGAGUGAGGUCU CGCGGGCC | 1724 |
| 50 | GACGAACU G UUCCCCCU | 1429 | AGGGGGAA GCCGAAAGGCGAGUGAGGUCU AGUUCGUC | 1725 |
| 69 | UCUUCCCG G CACAGCAG | 1430 | CUGCUCUG GCCGAAAGGCGAGUGAGCUCU CGGGAAGA | 1726 |
| 74 | CCGGCAGA G CAGCCCAA | 1431 | UUGGGCUG GCCGAAAGGCGAGUGAGGUCU UCUGCCGG | 1727 |
| 77 | GCAGAGCA G CCCAAGCA | 1432 | UGCUUGGG GCCGAAAGGCGAGUGAGGUCU UGCUCUGC | 1728 |
| 83 | CAGCCCAA G CAGCGGGG | 1433 | CCCCGCUG GCCGAAAGGCGAGUGAGGUCU UUGGGCUG | 1729 |
| 86 | CCCAAGCA G CGGGGCAU | 1434 | AUGCCCCG GCCGAAAGGCGAGUGAGGUCU UGCUUGGG | 1730 |
| 91 | GCAGCGGG G CAUGCGCU | 1435 | AGCGCAUG GCCGAAAGGCGAGUGAGGUCU CCCGCUGC | 1731 |
| 95 | CGGGGCAU G CGCUUCCG | 1436 | CGGAAGCG GCCGAAAGGCGAGUGAGGUCU AUGCCCCG | 1732 |
| 97 | GGGCAUGC G CUUCCGCU | 1437 | AGCGGAAG GCCGAAAGGCGAGUGAGGUCU GCAUGCCC | 1733 |
| 103 | GCGCUUCC G CUACAAGU | 1438 | ACUUGUAG GCCGAAAGGCGAGUGAGGUCU GGAAGCGC | 1734 |
| 110 | CGCUACAA G UGCGAGGG | 1439 | CCCUCGCA GCCGAAAGGCGAGUGAGGUCU UUGUAGCG | 1735 |
| 112 | CUACAAGU G CGAGGGGC | 1440 | GCCCCUCG GCCGAAAGGCGAGUGACGUCU ACUUGUAG | 1736 |
| 119 | UGCGAGGG G CGCUCCGC | 1441 | GCGGAGCG GCCGAAAGGCGAGUGAGGUCU CCCUCGCA | 1737 |
| 121 | CGAGGGGC G CUCCGCGG | 1442 | CCGCGGAG GCCGAAAGGCCAGUGAGGUCU GCCCCUCG | 1738 |
| 126 | GGCGCUCC G CGGGCAGC | 1443 | GCUGCCCG GCCGAAAGGCGAGUGAGGUCU GGAGCGCC | 1739 |
| 130 | CUCCGCGG C CACCAUCC | 1444 | GGAUGCUG CCCGAAAGGCGAGUGAGGUCU CCGCGGAG | 1740 |
| 133 | CGCGGGCA G CAUCCCAG | 1445 | CUGGGAUG GCCGAAAGGCGAGUGAGGUCU UGCCCGCG | 1741 |
| 142 | CAUCCCAG G CGAGAGGA | 1446 | UCCUCUCG GCCGAAACGCGAGUGAGGUCU CUGGCAUG | 1742 |
| 151 | OGAGAGGA C CACAGAUA | 1447 | UAUCUGUG GCCGAAAGGCGAGUGAGGUCU UCCUCUCG | 1743 |
| 193 | GAUCAAUG C CUACACAG | 1448 | CUGUGUAG GCCGAAAGGCGAGUGAGGUCU CAUUGAUC | 1744 |
| 213 | CAGGGACA C UGCGCAUC | 1449 | GAUGCGCA GCCGAAAGGCGAGUGAGGUCU UGUCCCUG | 1745 |
| 215 | GGGACAGU G CGCAUCUC | 1450 | GAGAUGCG GCCGAAAGGCGAGUGAGGUCU ACUGUCCC | 1746 |
| 217 | GACAGUGC C CAUCUCCC | 1451 | GGGAGAUG GCCGAAAGGCGAGUGAGGUCU GCACUGUC | 1747 |
| 228 | UCUCCCUG G UCACCAAG | 1452 | CUUGGUGA GCCGAAAGGCGAGUGAGGUCU CAGGGAGA | 1748 |
| 251 | CCUCACCG C CCUCACCC | 1453 | GGGUGAGG GCCGAAAGGCGAGUGAGGUCU CGGUGAGG | 1749 |
| 266 | CCCCACGA G CUUGUAGG | 1454 | CCUACAAG GCCGAAAGGCGAGUGAGGUCU UCCUCGGG | 1750 |
| 270 | ACGAGCUU C UAGGAAAG | 1455 | CUUUCCUA GCCGAAAGGCGAGUGAGGUCU AAGCUCGU | 1751 |
| 283 | AAAGGACU G CCGGGAUG | 1456 | CAUCCCGG GCCGAAAGGCGAGUGAGGUCU AGUCCUUU | 1752 |
| 292 | CCGCGAUG G CUUCUAUG | 1457 | CAUAGAAG GCCCAAAGGCGAGUGAGGUCU CAUCCCGG | 1753 |
| 303 | UCUAUGAG C CUGAGCUC | 1458 | GACCUCAG CCCGAAACGCGAGUGAGGUCU CUCAUAGA | 1754 |
| 308 | GAGGCUGA C CUCUGCCC | 1459 | GCCCAGAG GCCGAAAGGCGAGUCACGUCU UCAGCCUC | 1755 |
| 313 | UCAGCUCU G CCCCGACC | 1460 | GGUCCGGG GCCGAAAGGCGAGUCAGGUCU AGACCUCA | 1756 |
| 322 | CCCGGACC G CUGCAUCC | 1461 | GGAUGCAC GCCGAAAGGCGAGUGAGGUCU GGUCCGGG | 1757 |
| 325 | GGACCGCU G CAUCCACA | 1462 | UGUGGAUG GCCGAAAGGCGAGUGAGGUCU AGCGGUCC | 1758 |
| 334 | CAUCCACA C UUUCCACA | 1463 | UCUCCAAA GCCCAAAGGCGACUCAGGUCU UGUGGAUG | 1759 |
| 356 | GGAAUCCA G UGUGUGAA | 1464 | UUCACACA GCCGAAAGGCGAGUGAGGUCU UGGAUUCC | 1760 |
| 358 | AAUCCACU C UCUCAAGA | 1465 | UCUUCACA GCCCAAAGGCGAGUGAGGUCU ACUCCAUU | 1761 |
| 360 | UCCAGUGU C UGAAGAAG | 1466 | CUUCUUCA GCCGAAAGGCGAGUCAGGUCU ACACUCCA | 1762 |
| 368 | GUGAACAA G CGGGACCU | 1467 | AGGUCCCC CCCGAAAGGCGAGUCACCUCU UUCUUCAC | 1763 |
| 380 | CACCUGGA G CAGGCUAU | 1468 | AUAGCCUG GCCGAAAGGCGAGUGAGGUCU UCCAGGUC | 1764 |
| 384 | UGGACCAG G CUAUCAGU | 1469 | ACUGAUAG GCCGAAAGGCGAGUGAGGUCU CUGCUCCA | 1765 |
| 391 | GGCUAUCA G UCAGCGCA | 1470 | UGCGCUGA GCCGAAAGGCGAGUGAGGUCU UGAUAGCC | 1766 |
| 395 | AUCAGUCA G CGCAUCCA | 1471 | UGGAUGCG GCCGAAAGGCCAGUGAGCUCU UGACUGAU | 1767 |
| 397 | CAGUCAGC G CAUCCAGA | 1472 | UCUGGAUG GCCGAAAGGCGAGUGAGGUCU GCUGACUG | 1768 |
| 426 | CCUUCCAA G UUCCUAUA | 1473 | UAUAGGAA GCCGAAAGGCGAGUGAGGUCU UUCGAAGG | 1769 |
| 440 | AUAGAACA C CAGCGUGG | 1474 | CCACGCUG GCCGAAAGGCGAGUGAGGUCU UCUUCUAU | 1770 |
| 443 | CAACACCA C COUGGOGA | 1475 | UCCCCACG GCCCAAAGGCGAGUGAGGUCU UGCUCUUC | 1771 |
| 445 | AGAGCAGC G UGGGGACU | 1476 | ACUCCCCA GCCGAAAGGCGAGUGAGGUCU GCUGCUCU | 1772 |
| 465 | ACCUCAAU C CUGUCCCG | 1477 | CCGCACAG GCCGPAAGGCGAGUGAGGUCU AUUCAGGU | 1773 |
| 468 | UGAAUGCU C UGCGGCUC | 1478 | GAGCCGCA GCCCAAAGGCGAGUGAGGUCU AGCAUUCA | 1774 |
| 470 | AAUGCUGU C CGGCUCUG | 1479 | CAGAGCCG CCCGAAAGGCGAGUGAGCUCU ACAGCAUU | 1775 |
| 473 | GCUGUGCG G CUCUGCUU | 1480 | AAGCAGAG GCCGAAAGGCGAGUGAGGUCU CGCACAGC | 1776 |
| 478 | GCGGCUCU G CUUCCAGC | 1481 | CCUGGAAG GCCGAAAGGCGACUGAGGUCU AGAGCCGC | 1777 |
| 486 | GCUUCCAG G UCACAGUG | 1482 | CACUGUCA GCCCAAAGGCGAGUGAGCUCU CUGGAAGC | 1778 |
| 492 | AGGUGACA C UGCGCGAC | 1483 | CUCCCGCA GCCGAAAGGCGAGUGAGGUCU UGUCACCU | 1779 |
| 494 | GUGACAGU G CCGCACCC | 1484 | CCCUCCCG CCCCAAAGGCCAGUGAGGUCU ACUGUCAC | 1780 |
| 508 | CCCAUCAG G CAGGCCCC | 1485 | CCCCCCUG GCCGAAAGGCCAGUGACCUCU CUCAUGGG | 1781 |
| 512 | UCAGCCAG G CCCCUCCC | 1486 | CCGAGCGG GCCGAAAGGCCACUGACGUCU CUGCCUGA | 1782 |
| 520 | GCCCCUCC G CCUGCCCC | 1487 | GCGCCAGG GCCGAAAGGCGAGUGAGGUCU CCACGCCC | 1783 |
| 524 | CUCCGCCU C CCGCCUGU | 1488 | ACACGCCG GCCGAAAGGCGACUGAGCUCU AGCCGGAG | 1784 |
| 527 | CGCCUGCC C CCUGUCCU | 1489 | ACGACACC CCCGAAAGGCGAGUGAGGUCU GGCAGCCC | 1785 |
| 531 | UGCCGCCU G UCCUUUCU | 1490 | AGAAAGGA CCCGAAAGGCCAGUGAGGUCU ACGCGGCA | 1786 |
| 559 | UGACAAUC G UGCCCCCA | 1491 | UCCGGGCA GCCGAAAGGCGAGUGAGGUCU CAUUGUCA | 1787 |
| 561 | ACAAUCGU C CCCCCAAC | 1492 | GUUCGCGG GCCGAAAGGCGAGUCACGUCU ACGAUUGU | 1788 |
| 573 | CCAACACU C CCGAGCUC | 1493 | GAGCUCGC CCCGAAAGGCGAGUGAGGUCU AGUGUUCG | 1789 |
| 578 | ACUGCCCA C CUCAAGAU | 1494 | AUCUUGAG GCCCAAAGCCGAGUCACCUCU UCCGCAGU | 1790 |
| 589 | CAAGAUCU C CCCACUGA | 1495 | UCACUCCC CCCGAAAGGCGACUGAGGUCU AGAUCUUG | 1791 |
| 594 | UCUCCCGA C UCAACCGA | 1496 | UCGGUUCA CCCGAAAGGCCACUGAGGUCU UCGGCACA | 1792 |
| 610 | AAACUCUG C CAGCUGCC | 1497 | GGCAGCUC GCCCAAAGGCGAGUGACGUCU CAGAGUUU | 1793 |
| 613 | CUCUGCCA C CUGCCUCC | 1498 | CCACGCAC GCCGAAAGCCCACUGAGGUCU UGCCACAC | 1794 |
| 616 | UGGCAGCU C CCUCGGUG | 1499 | CACCGAGG GCCCAAAGGCCAGUCACCUCU AGCUGCCA | 1795 |
| 622 | CUCCCUCC C UCGCCAUC | 1500 | CAUCCCCA GCCCAAAGCCCACUCACGUCU CGAGCCAC | 1796 |
| 644 | UUCCUACU C UCUGACAA | 1501 | UUGUCACA GCCGAAAGGCGACUCACCUCU ACUACCAA | 1797 |
| 646 | CCUACUCU G UCACAAGC | 1502 | CCUUGUCA CCCCAAAGCCGACUGACCUCU ACAGUAGC | 1798 |
| 654 | GUCACAAG G UGCAGAAA | 1503 | UUUCUGCA GCCGAAAGGCGAGUGAGGUCU CUUCUCAC | 1799 |
| 656 | GACAACGU C CACAAACA | 1504 | UCUUUCUC CCCCAAAGCCCAGUCACGUCU ACCUUGUC | 1800 |
| 675 | ACAUUGAG C UCUAUUUC | 1505 | CAAAUACA GCCCUAAGGCCAGUGAGGUCU CUCAAUGU | 1801 |
| 677 | AUUGAGGU C UAUUUCAC | 1506 | GUCAAAUA CCCCAAACCCCACUCACCUCU ACCUCAAU | 1802 |
| 694 | CCCACCAG C CUGGCAGG | 1507 | CCUCCCAG CCCCAAAGCCCAGUGACCUCU CUGGUCCC | 1803 |
| 702 | GCUCCGAG C CCCGACCC | 1508 | GCCUCGGC GCCGAAAGGCCAGUGAGGUCU CUCCCACC | 1804 |
| 709 | GGCCCCAG C CUCCUUUU | 1509 | AAAAGCAC CCCGAAAGGCGACUGACCUCU CUCCCCCC | 1805 |
| 719 | UCCUUUUC C CAACCUGA | 1510 | UCAGCUUG GCCCAAAGCCGACUGACCUCU GAAAAGCA | 1806 |
| 723 | UUUCCCAA C CUGAUGUC | 1511 | CACAUCAC CCCCAAACCCCACUGAGGUCU UUGCGAAA | 1807 |
| 729 | AACCUGAU C UCCACCCA | 1512 | UCCCUCCA CCCGAAAGCCCACUCACCUCU AUCAGCUU | 1808 |
| 731 | GCUCAUCU C CACCCACA | 1513 | UGUCGGUG CCCCAAACCCCACUCACCUCU ACAUCACC | 1809 |
| 741 | ACCCACAA C UCGCCAUU | 1514 | AAUCGCCA CCCCAAAGGCCACUCACGUCU UUCUCGGU | 1810 |
| 744 | CACAACUG C CCAUUCUC | 1515 | CACAAUCC CCCCAAAGCCCACUCACCUCU CACUUGUC | 1811 |
| 750 | UCGCCAUU C UCUUCCCC | 1516 | CCCCAACA GCCGAAAGGCCAGUGACCUCU AAUGCCCA | 1812 |
| 752 | GCCAUUCU C UUCCCCAC | 1517 | CUCCGCAA CCCCAAAGCCGACUCACCUCU ACAAUGCC | 1813 |
| 771 | CUCCCUAC C CAGACCCC | 1518 | CCCCUCUC CCCCAAAGGCCACUCACCUCU CUAGCGAC | 1814 |
| 781 | AGACCCCA G CCUGCAGG | 1519 | CCUGCAGG GCCGAAAGGCGAGUGAGGUCU UGGGGUCU | 1815 |
| 785 | CCCAGCCU G CAGGCUCC | 1520 | GGAGCCUG GCCGAAAGGCGAGUGAGGUCU AGGCUGGG | 1816 |
| 789 | GCCUGCAG G CUCCUGUG | 1521 | CACAGGAG GCCGAAAGGCGAGUGAGGUCU CUGCAGGC | 1817 |
| 795 | AGGCUCCU G UGCGUGUC | 1522 | GACACGCA GCCGAAAGGCGAGUGAGGUCU AGGAGCCU | 1818 |
| 797 | GCUCCUGU G CGUGUCUC | 1523 | GAGACACG GCCGAAAGGCGAGUGAGGUCU ACAGGAGC | 1819 |
| 799 | UCCUGUGC G UGUCUCCA | 1524 | UGGAGACA GCCGAAAGGCGAGUGAGGUCU GCACAGGA | 1820 |
| 801 | CUGUGCGU G UCUCCAUG | 1525 | CAUGGAGA GCCGAAAGGCGAGUGAGGUCU ACGCACAG | 1821 |
| 809 | GUCUCCAU G CAGCUGCG | 1526 | CGCAGCUG GCCGAAAGGCGAGUGAGGUCU AUGGAGAC | 1822 |
| 812 | UCCAUGCA G CUGCGGCG | 1527 | CGCCGCAG GCCGAAAGGCGAGUGAGGUCU UGCAUGGA | 1823 |
| 815 | AUGCAGCU G CGGCGGCC | 1528 | GGCCGCCG GCCGAAAGGCGAGUGAGGUCU AGCUGCAU | 1824 |
| 818 | CAGCUGCG G CGGCCUUC | 1529 | GAAGGCCG GCCGAAAGGCGAGUGAGGUCU CGCAGCUG | 1825 |
| 821 | CUGCGGCG G CCUUCCGA | 1530 | UCGGAAGG GCCGAAAGGCGAGUGAGGUCU CGCCGCAG | 1826 |
| 836 | GACCGGGA G CUCAGUGA | 1531 | UCACUGAG GCCGAAAGGCGAGUGAGGUCU UCCCGGUC | 1827 |
| 841 | GGAGCUCA G UGAGCCCA | 1532 | UGGGCUCA GCCGAAAGGCGAGUGAGGUCU UGAGCUCC | 1828 |
| 845 | CUCAGUGA G CCCAUGGA | 1533 | UCCAUGGG GCCGAAAGGCGAGUGAGGUCU UCACUGAG | 1829 |
| 860 | GAAUUCCA G UACCUGCC | 1534 | GGCAGGUA GCCGAAAGGCGAGUGAGGUCU UGGAAUUC | 1830 |
| 866 | CAGUACCU G CCAGAUAC | 1535 | GUAUCUGG GCCGAAAGGCGAGUGAGGUCU AGGUACUG | 1831 |
| 883 | AGACGAUC G UCACOGGA | 1536 | UCCGGUGA GCCGAAAGGCGAGUGAGGUCU GAUCGUCU | 1832 |
| 904 | GGAGAAAC G UAAAAGGA | 1537 | UCCUUUUA GCCGAAAGGCGAGUGAGGUCU GUUUCUCC | 1833 |
| 931 | CUUCAAGA G CAUCAUGA | 1538 | UCAUGAUG GCCGAAAGGCGAGUGAGGUCU UCUUGAAG | 1834 |
| 946 | GAAGAAGA G UCCUUUCA | 1539 | UGAAAGGA GCCGAAAGGCGAGUGAGGUCU UCUUCUUC | 1835 |
| 955 | UCCUUUCA G CGGACCCA | 1540 | UGGGUCCG GCCGAAAGGCGAGUGAGGUCU UGAAAGGA | 1836 |
| 974 | GACCCCCG G CCUCCACC | 1541 | GGUGGAGG GCCGAAAGGCGAGUGAGGUCU CGGGGGUC | 1837 |
| 988 | ACCUCGAC G CAUUGCUG | 1542 | CAGCAAUG GCCGAAAGGCGAGUGAGGUCU GUCGAGGU | 1838 |
| 993 | GACGCAUU G CUGUGCCU | 1543 | AGGCACAG GCCGAAAGGCGAGUGAGGUCU AAUGCGUC | 1839 |
| 996 | GCAUUGCU G UGCCUUCC | 1544 | GGAAGGCA GCCGAAAGGCGAGUGAGGUCU AGCAAUGC | 1840 |
| 998 | AUUGCUGU G CCUUCCCG | 1545 | CGGGAAGG GCCGAAAGGCGAGUGAGGUCU ACAGCAAU | 1841 |
| 1006 | GCCUUCCC G CAGCUCAG | 1546 | CUGAGCUG GCCGAAAGGCGAGUGAGGUCU GGGAAGGC | 1842 |
| 1009 | UUCCCGCA G CUCAGCUU | 1547 | AAGCUGAG GCCGAAAGGCGAGUGAGGUCU UGCGGGAA | 1843 |
| 1014 | GCAGCUCA G CUUCUGUC | 1548 | GACAGAAG GCCGAAAGGCGAGUGAGGUCU UGAGCUGC | 1844 |
| 1020 | CAGCUUCU G UCCCCAAG | 1549 | CUUGGGGA GCCGAAAGGCGAGUGAGGUCU AGAAGCUG | 1845 |
| 1028 | GUCCCCAA G CCAGCACC | 1550 | GGUGCUGG GCCGAAAGGCGAGUGAGGUCU UUGGGGAC | 1846 |
| 1032 | CCAAGCCA G CACCCCAG | 1551 | CUGGGGUG GCCGAAAGGCGAGUGAGGUCU UGGCUUGG | 1847 |
| 1040 | GCACCCCA G CCCUAUCC | 1552 | GGAUAGGG GCCGAAAGGCGAGUGAGGUCU UGGGGUGC | 1848 |
| 1055 | CCCUUUAC G UCAUCCCU | 1553 | AGGGAUGA GCCGAAAGGCGAGUGAGGUCU GUAAAGGG | 1849 |
| 1066 | AUCCCUGA G CACCAUCA | 1554 | UGAUGGUG GCCGAAAGGCGAGUGAGGUCU UCAGGGAU | 1850 |
| 1085 | UAUGAUGA G UUUCCCAC | 1555 | GUGGGAAA GCCGAAAGGCGAGUGAGGUCU UCAUCAUA | 1851 |
| 1098 | CCACCAUG G UGUUUCCU | 1556 | AGGAAACA GCCGAAAGGCGAGUGAGGUCU CAUGGUGG | 1852 |
| 1100 | ACCAUGGU G UUUCCUUC | 1557 | GAAGGAAA GCCGAAAGGCGAGUGAGGUCU ACCAUGGU | 1853 |
| 1112 | CCUUCUGG G CAGAUCAG | 1558 | CUGAUCUG GCCGAAAGGCGAGUGAGGUCU CCAGAAGG | 1854 |
| 1120 | GCAGAUCA G CCAGGCCU | 1559 | AGGCCUGG GCCGAAAGGCGAGUGAGGUCU UGAUCUGC | 1855 |
| 1125 | UCAUCCAG G CCUCGGCC | 1560 | GGCCGAGG GCCGAAAGGCGAGUGAGGUCU CUGGCUGA | 1856 |
| 1131 | AGGCCUCG G CCUUGGCC | 1561 | GGCCAAGG GCCGAAAGGCGAGUGAGGUCU CGAGGCCU | 1857 |
| 1137 | CGGCCUUG G CCCCGGCC | 1562 | GGCCGGGG GCCGAAAGGCGAGUGAGGUCU CAAGGCCG | 1858 |
| 1143 | UGGCCCCG G CCCCUCCC | 1563 | GGGAGGGG GCCGAAAGGCGAGUGAGGUCU CGGGGCCA | 1859 |
| 1155 | CUCCCCAA G UCCUGCCC | 1564 | GGGCAGGA GCCGAAAGGCGAGUGAGGUCU UUGGGGAG | 1860 |
| 1160 | CAAGUCCU G CCCCAGGC | 1565 | GCCUGGGG GCCGAAAGGCGAGUGAGGUCU AGGACUUG | 1861 |
| 1167 | UGCCCCAG G CUCCAGCC | 1566 | GGCUGGAG GCCGAAAGGCGAGUGAGGUCU CUGGGGCA | 1862 |
| 1173 | AGGCUCCA G CCCCUGCC | 1567 | GGCAGGGG GCCGAAAGGCGAGUGAGGUCU UGGAGCCU | 1863 |
| 1179 | CAGCCCCU G CCCCUGCU | 1568 | AGCAGGGG GCCGAAAGGCGAGUGAGGUCU AGGGGCUG | 1864 |
| 1185 | CUGCCCCU G CUCCAGCC | 1569 | GGCUGGAG GCCGAAAGGCGAGUGAGGUCU AGGGGCAG | 1865 |
| 1191 | CUCCUCCA G CCAUGGUA | 1570 | UACCAUGG GCCGAAAGGCGAGUGAGGUCU UGGAGCAG | 1866 |
| 1197 | CAGCCAUG G UAUCAGCU | 1571 | AGCUGAUA GCCGAAAGGCGAGUGACGUCU CAUGCCUG | 1867 |
| 1203 | UGGUAUCA G CUCUGGCC | 1572 | CGCCAGAG GCCGAAAGGCGAGUGAGGUCU UGAUACCA | 1868 |
| 1209 | CAGCUCUG G CCCAAGCC | 1573 | GGCCUGGG GCCGAAAGGCGAAUGAGGUCU CAGAGCUG | 1869 |
| 1215 | UGGCCCAG G CCCCAGCC | 1574 | GGCUGGGG GCCGAAAGGCGAGUGAGGUCU CUGGGCCA | 1870 |
| 1221 | AGGCCCCA C CCCCUGUC | 1575 | GACAGCGG CCCGAAAGGCGAGUCAGGUCU UGGGGCCU | 1871 |
| 1227 | CACCCCCU G UCCCAGUC | 1576 | GACUGGGA GCCGAAAGGCGAGUGAGGUCU AGGGGCUG | 1872 |
| 1233 | CUGUCCCA G UCCUAGCC | 1577 | CGCUAGGA GCCGAAAGGCGAGUGAGGUCU UGGGACAG | 1873 |
| 1239 | CAGUCCUA C CCCCAGGC | 1578 | GCCUGGCG CCCGAAACGCGACUGAGGUCU UAGCACUG | 1874 |
| 1246 | AGCCCCAG G CCCUCCUC | 1579 | CAGGACGG CCCGAAAGGCGACUGAGGUCU CUGGGGCU | 1875 |
| 1257 | CUCCUCAG G CUGUCGCC | 1580 | GGCCACAG GCCGAAAGGCGAGUGAGGUCU CUGAGGAG | 1876 |
| 1260 | CUCAGGCU G UGGCCCCA | 1581 | UGGGGCCA GCCGAAAGGCGAGUGAGGUCU AGCCUGAG | 1877 |
| 1263 | AGGCUGUG G CCCCACCU | 1582 | AGGUGGGG GCCGAAAGGCGAGUGAGGUCU CACAGCCU | 1878 |
| 1272 | CCCCACCU G CCCCCAAC | 1583 | CUUCGGGG GCCGAAAGGCGAGUGAGGUCU AGGUGGGG | 1879 |
| 1280 | GCCCCCAA G CCCACCCA | 1584 | UGGCUGGG GCCGAAAGGCGAGUGAGGUCU UUGGGGGC | 1880 |
| 1290 | CCACCCAG G CUGGGGAA | 1585 | UUCCCCAG GCCGAAAGGCGAGUGAGCUCU CUGOGUOG | 1881 |
| 1304 | GAAGGAAC G CUGUCAGA | 1586 | UCUGACAG GCCGAAAGGCGAGUGAGGUCU GUUCCUUC | 1882 |
| 1307 | GGAACGCU G UCAGAGGC | 1587 | GCCUCUGA GCCGAAAGGCGAGUGAGGUCU AGCGUUCC | 1883 |
| 1314 | UGUCAGAG C CCCUGCUG | 1588 | CAGCAGGG GCCGAAAGGCGAGUGAGGUCU CUCUGACA | 1884 |
| 1319 | GAGGCCCU G CUGCAGCU | 1589 | AGCUGCAG GCCGAAAGGCCAGUGAGGUCU AGGGCCUC | 1885 |
| 1322 | CCCCUGCU G CACCUCCA | 1590 | UGCAGCUG GCCGAAAGGCGAGUGAGGUCU AGCAGGGC | 1886 |
| 1325 | CUGCUGCA G CUGCAGUU | 1591 | AACUGCAG GCCGAAACGCGAGUGAGGUCU UGCAGCAG | 1887 |
| 1328 | CUGCAGCU G CAGUUUGA | 1592 | UCAAACUG GCCGAAAGGCGAGUGAGGUCU AGCUCCAG | 1888 |
| 1331 | CAGCUGCA G UUUGAUGA | 1593 | UCAUCAAA GCCGAAACGCCAGUGAGGUCU UGCAGCUG | 1889 |
| 1353 | ACCUGGGG C CCUUGCUU | 1594 | AAGCAAGG CCCGAAAGGCGAGUGAGGUCU CCCCAGGU | 1890 |
| 1358 | GGGGCCUU C CUUGGCAA | 1595 | UUGCCAAG GCCGAAAGGCGAGUGAGGUCU AAGGCCCC | 1891 |
| 1363 | CUUGCUUG C CAACAGCA | 1596 | UGCUGUUG GCCGAAAGGCGAGUGAGGUCU CAAGCAAG | 1892 |
| 1369 | UGGCAACA C CACAGACC | 1597 | GCUCUGUC GCCGAAACGCGAGUGAGGUCU UGUUGCCA | 1893 |
| 1380 | CAGACCCA G CUGUGGUC | 1598 | GAACACAG GCCGAAACGCGAGUGAGGUCU UGGGUCUG | 1894 |
| 1383 | ACCCAGCU G UGUUCACA | 1599 | UGUGAACA GCCGAAAGGCGAGUGAGGUCU AGCUGGGU | 1895 |
| 1385 | CCAGCUGU C UUCACAGA | 1600 | UCUGUGAA GCCGAAAGGCGAGUGAGCUCU ACAGCUCG | 1896 |
| 1398 | CAGACCUG C CAUCCCUC | 1601 | GACGGAUG GCCGAAAGGCGAGUGAGGUCU CAGGUCUG | 1897 |
| 1404 | UGGCAUCC C UCCACAAC | 1602 | GUUGUCCA GCCCAAAGCCGAGUGAGGUCU GCAUCCCA | 1898 |
| 1418 | AACUCCGA C UUUCAGCA | 1603 | UGCUGAAA GCCGAAAGGCGAGUGAGGUCU UCGGAGUU | 1899 |
| 1424 | GAGUUUCA C CAGCUGCU | 1604 | ACCACCUG CCCGAAACGCGAGUGAGGUCU UGAAACUC | 1900 |
| 1427 | UUUCAGCA C CUGCUGAA | 1605 | UUCAGCAG GCCCAAAGGCGACUGAGGUCU UCCUCAAA | 1901 |
| 1430 | CAGCAGCU C CUGAACCA | 1606 | UGGUUCAG GCCGAAAGGCGAGUGACGUCU ACCUCCUG | 1902 |
| 1441 | CAACCAGG C CAUACCUG | 1607 | CAGGUAUG GCCGAAAGGCGAGUGAGGUCU CCUGGUUC | 1903 |
| 1449 | GCAUACCU C UCGCCCCC | 1608 | GGGGGCCA GCCGAAAGGCGAGUGAGGUCU AGCUAUGC | 1904 |
| 1452 | UACCUCUG C CCCCCCAC | 1609 | CUGCGGCG GCCGAAAGGCGAGUGAGGUCU CACAGGUA | 1905 |
| 1469 | ACAACUCA C CCCAUGCU | 1610 | AGCAUGGG GCCGAAAGGCGAGUGAGGUCU UCAGUUCU | 1906 |
| 1475 | GAGCCCAU C CUGAUGGA | 1611 | UCCAUCAC GCCCAAACGCCAGUGAGCUCU AUCGGCUC | 1907 |
| 1484 | CUGAUGGA C UACCCUGA | 1612 | UCAGGCUA GCCGAAACCCGAGUGACGUCU UCCAUCAC | 1908 |
| 1494 | ACCCUCAG C CUAUAACU | 1613 | AGUUAUAG GCCGAAAGGCGAGUGAGGUCU CUCAGGGU | 1909 |
| 1504 | UAUAACUC C CCUACUGA | 1614 | UCACUAGC CCCCAAACGCGACUGACGUCU GAGUUAUA | 1910 |
| 1509 | CUCGCCUA C UGACAGCC | 1615 | CGCUGUCA GCCGAAAGGCGAGUGAGGUCU UAGGCGAG | 1911 |
| 1515 | UACUGACA C CCCACACC | 1616 | CCUCUCCG GCCCAAACGCGACUGACCUCU UGUCACUA | 1912 |
| 1523 | CCCCACAG C CCCCCCGA | 1617 | UCGGCGCC CCCGAAAGGCGAGUGAGGUCU CUCUCGCC | 1913 |
| 1536 | CCGACCCA C CUCCUGCU | 1618 | ACCAGGAG CCCCAAACCCCAGUCACGUCU UCCGUCGG | 1914 |
| 1542 | CAGCUCCU C CUCCACUG | 1619 | CAGUGGAG GCCGAAAGCCGAGUGACGUCU AGGACCUC | 1915 |
| 1554 | CACUGGGC C CCCCCGGG | 1620 | CCCCGGCG GCCGAAAGGCGAGUGAGCUCU CCCCAGUC | 1916 |
| 1562 | GCCCCGGG G CUCCCCAA | 1621 | UUGGGGAG GCCGAAAGGCGAGUGAGGUCU CCCGGGAAC | 1917 |
| 1573 | CCCCAAUG G CCUCCUUU | 1622 | AAAGGAGG GCCGAAAGGCGAGUGAGGUCU CAUUGGGG | 1918 |
| 1608 | CCUCCAUU G OGGACAUG | 1623 | CAUGUCCG GCCGAAAGGCGAGUGAGGUCU AAUGGAGG | 1919 |
| 1626 | ACUUCUCA G CCCUGCUG | 1624 | CAGCAGGG GCCGAAAGGCGAGUGAGGUCU UGAGAAGU | 1920 |
| 1631 | UCAGCCCU G CUGAGUCA | 1625 | UGACUCAG GCCGAAAGGCGAGUGAGGUCU AGGGCUGA | 1921 |
| 1636 | CCUGCUGA G UCAGAUCA | 1626 | UGAUCUGA GCCGAAAGGCGAGUGAGGUCU UCAGCAGG | 1922 |
| 1645 | UCAGAUCA C CUCCUAAG | 1627 | CUCAGGAG GCCGAAAGGCGAGUGAGGUCU UGAUCUGA | 1923 |
| 1657 | CUAAGGGG G UGACGCCU | 1628 | AGGCGUCA GCCGAAAGGCGAGUGAGGUCU CCCCUUAG | 1924 |
| 1662 | GGGGUGAC G CCUGCCCU | 1629 | AGGGCAGG GCCGAAAGGCGAGUGAGGUCU GUCACCOC | 1925 |
| 1666 | UGACGCCU G CCCUCCCC | 1630 | GGGGAGGG GCCGAAAGGCGAGUGAGGUCU AGGCGUCA | 1926 |
| 1678 | UCCCCAGA G CACUGGUC | 1631 | AACCAGUG GCCGAAAGGCGAGUGAGGUCU UCUGGGGA | 1927 |
| 1684 | GACCACUG G UUGCAGGG | 1632 | CCCUGCAA GCCGAAAGGCGAGUGAGGUCU CAGUGCUC | 1928 |
| 1687 | CACUGGUC G CAGGGGAU | 1633 | AUCCCCUG GCCGAAAGGCGAGUGAGGUCU AACCAGUG | 1929 |
| 1700 | GGAUUGAA G CCCUCCAA | 1634 | UUGGAGGG GCCGAAAGGCGAGUGAGGUCU UUCAAUCC | 1930 |
| 1711 | CUCCAAAA C CACUUACG | 1635 | CGUAAGUG GCCGAAAGGCGAGUGAGGUCU UUUUGGAG | 1931 |
| 1727 | GGAUUCUG G UGGGGUGU | 1636 | ACACCCCA GCCGAAAGGCGAGUGAGGUCU CAGAAUCC | 1932 |
| 1732 | CUGGUGGG G UGUGUUCC | 1637 | GGAACACA GCCGAAAGGCGAGUGAGGUCU CCCACCAG | 1933 |
| 1734 | GGUGGGGU G UGUUCCAA | 1638 | UUGGAACA GCCGAAAGGCGAGUGAGGUCU ACCCCACC | 1934 |
| 1736 | UGGGGUGU C UUCCAACU | 1639 | AGUUGGAA GCCGAAAGGCGAGUGAGGUCU ACACCCCA | 1935 |
| 1745 | UUCCAACU G CCCCCAAC | 1640 | GUUGGGGG GCCGAAAGGCGAGUGAGGUCU AGUUGGAA | 1936 |
| 1757 | CCAACUUU G UGGAUGUC | 1641 | GACAUCCA GCCGAAAGGCGAGUGAGGUCU AAAGUUGG | 1937 |
| 1763 | UUGUGGAU G UCUUCCUC | 1642 | AAGGAAGA GCCGAAAGGCGAGUGAGGUCU AUCCACAA | 1938 |
| 1782 | AGGGGGGA G CCAUAUUU | 1643 | AAAUAUGG GCCGAAAGGCGAGUGAGGUCU UCCCCCCU | 1939 |
| 1803 | CUUUUAUU G UCAGUAUC | 1644 | GAUACUGA GCCGAAAGGCGAGUGAGGUCU AAUAAAAG | 1940 |
| 1807 | UAUUGUCA C UAUCUGUA | 1645 | UACAGAUA GCCGAAAGGCGAGUGAGGUCU UGACAAUA | 1941 |
| 1813 | CAGUAUCU C UAUCUCUC | 1646 | GAGAGAUA GCCGAAAGGCGAGUGAGGUCU AGAUACUG | 1942 |
| 1835 | UUUUGGAG C UGCUUAAG | 1647 | CUUAAGCA GCCGAAAGGCGAGUGAGGUCU CUCCAAAA | 1943 |
| 1837 | UUGGAGGU C CUUAAGCA | 1648 | UGCUUAAG GCCGAAAGGCGAGUGAGGUCU ACCUCCAA | 1944 |
| 1843 | GUGCUUAA C CAGAAGCA | 1649 | UGCUUCUG GCCGAAAGGCGAGUGAGGUCU UUAAGCAC | 1945 |
| 1849 | AAGCAGAA C CAUUAACU | 1650 | AGUUAAUG GCCGAAAGGCGAGUGAGGUCU UUCUGCUU | 1946 |
| 1875 | AGCGCCCA C CUGGGGAA | 1651 | UUCCCCAG CCCGAAAGGCGAGUGAGGUCU UCCCCCCU | 1947 |
| 1901 | UUUCCCCU C UCCUGAUG | 1652 | CAUCAGGA GCCGAAAGGCGAGUGAGGUCU AGGGGAAA | 1948 |
| 1910 | UCCUCAUC C UCACCUCC | 1653 | COACCUCA GCCGAAAGGCGAGUGAGGUCU CAUCACCA | 1949 |
| 1914 | GAUCCUCA C CUCCCUUC | 1654 | GAAGGGAG GCCGAAAGGCGAGUGAGGUCU UCACCAUC | 1950 |
| 1926 | CCUUCUCU C UAGGGAAC | 1655 | GUUCCCUA GCCGAAAGGCGAGUGAGGUCU AGAGAAGG | 1951 |
| 1936 | AGGGAACU C UCGGGUCC | 1656 | CCACCCCA GCCGAAAGGCGAGUGAGGUCU AGUUCCCU | 1952 |
| 1941 | ACUGUGGG C UCCCCCAU | 1657 | AUGGGGCA GCCGAAACGCGAGUGAGGUCU CCCACACU | 1953 |
| 1962 | AUCCUCCA C CUUCUGGU | 1658 | ACCAGAAG GCCGAAAGGCGAGUGAGGUCU UGCACGAU | 1954 |
| 1969 | AGCUUCUG C UACUCUCC | 1659 | GGAGAGUA GCCGAAAGGCGAGUGAGGUCU CAGAAGCU | 1955 |
| 1989 | AGACAGAA C CACCCUCC | 1660 | CCACCCUC GCCGAAACGCGACUGAGGUCU UUCUGUCU | 1956 |
| 1993 | AGAAGCAG C CUCCAGCU | 1661 | ACCUCCAG GCCGAAAGGCGAGUGAGGUCU CUGCUUCU | 1957 |
| 2000 | GGCUCGAC C UAAGGCCU | 1662 | AGGCCUUA GCCGAAAGGCGAGUGAGCUCU CUCCAGCC | 1958 |
| 2005 | GAGGUAAG C CCUUUGAG | 1663 | CUCAAAGG CCCGAAACCCGAGUCAGCUCU CUCACCUC | 1959 |
| 2013 | GCCUUUGA C CCCACAAA | 1664 | UUUGUGGG GCCCAAAGCCCACUGACCUCU UCAAAGGC | 1960 |
| 2022 | CCCACAAA C CCUUAUCA | 1665 | UCAUAAGC CCCGAAACGCGACUGAGGUCU UUUCUGGG | 1961 |
| 2032 | CUUAUCAA C UCUCUUCC | 1666 | GGAAGACA GCCGAAAGGCGAGUGAGGUCU UUGAUAAG | 1962 |
| 2034 | UAUCAAGU C UCUUCCAU | 1667 | AUCCAAGA CCCGAAACCCGACUCACCUCU ACUUCAUA | 1963 |
| 2058 | UCAUUACA C CUUAAUCA | 1668 | UCAUUAAC CCCGAAAGGCGACUGACGUCU UGUAAUGA | 1964 |
| 2074 | AAAAUAAC C CCCCACAU | 1669 | AUCUCCGC CCCCAAACCCCAGUCACCUCU CUUAUUUU | 1965 |
| 2087 | AGAUACCA C CCCCUGUA | 1670 | UACAGCGG CCCGAAAGGCGAGUGAGGUCU UCGUAUCU | 1966 |
| 2093 | CAGCCCCU C UAUGGCAC | 1671 | GUCCCAUA CCCGAAAGCCGACUCACCUCU ACCCCCUC | 1967 |
| 2098 | CCUGUAUG G CACUGGCA | 1672 | UGCCAGUG GCCGAAAGGCGAGUGAGGUCU CAUACAGG | 1968 |
| 2104 | UGGCACUG G CAUUGUCC | 1673 | GGACAAUG GCCGAAAGGCGAGUGAGGUCU CAGUGCCA | 1969 |
| 2109 | CUGGCAUU G UCCCUGUG | 1674 | CACAGGGA GCCGAAAGGCGAGUGAGGUCU AAUCCCAG | 1970 |
| 2115 | UUGUCCCU G UCCCUAAC | 1675 | GUUAGGCA GCCGAAAGGCGAGUGAGCUCU AGCGACAA | 1971 |
| 2117 | GUCCCUGU C CCUAACAC | 1676 | GUGUUAGG GCCGAAAGGCGAGUGAGGUCU ACAGGGAC | 1972 |
| 2128 | UAACACCA G CGUUUGAG | 1677 | CUCAAACG GCCGAAAGGCGAGUGAGGUCU UGGUGUUA | 1973 |
| 2130 | ACACCAGC G UUUGAGGG | 1678 | CCCUCAAA GCCGAAAGGCGAGUGAGGUCU GCUGGUGU | 1974 |
| 2139 | UUUGAGCG G CUGCCUUC | 1679 | GAAGGCAG GCCGAAAGGCGAGUGAGGUCU CCCUCAAA | 1975 |
| 2142 | GAGGGGCU G CCUUCCUG | 1680 | CAGGAAGG GCCGAAAGGCGAGUGAGGUCU AGCCCCUC | 1976 |
| 2150 | GCCUUCCU G CCCUACAG | 1681 | CUGUAGGG GCCGAAAGGCCACUGAGGUCU AGGAAGGC | 1977 |
| 2161 | CUACAGAG C UCUCUGCC | 1682 | GCCAGACA GCCGAAAGGCGAGUGAGGUCU CUCUGUAG | 1978 |
| 2167 | AGGUCUCU G CCGGCUCU | 1683 | AGAGCCGG GCCGAAAGGCGAGUGAGGUCU AGAGACCU | 1979 |
| 2171 | CUCUGCCG G CUCUUUCC | 1684 | GGAAAGAG GCCGAAAGGCGAGUGAGGUCU CGGCAGAG | 1980 |
| 2182 | CUUUCCUU G CUCAACCA | 1685 | UGGUUGAG GCCGAAAGGCGAGUGAGGUCU AAGGAAAG | 1981 |
| 2193 | CAACCAUG G CUGAAGGA | 1686 | UCCUUCAG GCCGAAAGGCGAGUGAGGUCU CAUGGUUG | 1982 |
| 2206 | AGGAAACA G UCCAACAG | 1687 | CUGUUGCA GCCGAAAGGCCAGUGAGGUCU UGUUUCCU | 1983 |
| 2208 | GAAACAGU G CAACAGCA | 1688 | UGCUGUUG GCCGAAAGGCGAGUGAGGUCU ACUGUUUC | 1984 |
| 2214 | GUGCAACA G CACUGGCU | 1689 | AGCCAGUG GCCGAAAGGCGAGUGAGGUCU UGUUGCAC | 1985 |
| 2220 | CACCACUG G CUCUCUCC | 1690 | GGAGACAG GCCGAAACCCCAGUGAGGUCU CAGUGCUC | 1986 |
| 2243 | CAGAAGGG G UUUGGUCU | 1691 | AGACCAAA GCCGAAAGGCGAGUGAGGUCU CCCUUCUG | 1987 |
| 2248 | GGGGUUUG G UCUGGACU | 1692 | AGUCCAGA GCCGAAAGCCGAGUGAGGUCU CAAACCCC | 1988 |
| 2262 | ACUUCCUU C CUCUCCCC | 1693 | GGGGAGAG GCCGAAAGGCGAGUGAGGUCU AAGGAAGU | 1989 |
| 2280 | CUUCUCAA C UGCCUUAA | 1694 | UUAAGGCA GCCGAAAGGCGAGUGAGCUCU UUGAGAAG | 1990 |
| 2282 | UCUCAAGU G CCUUAAUA | 1695 | UAUUAAGG CCCGAAAGGCGACUGAGGUCU ACUGGAGA | 1991 |
| 2291 | CCUUAAUA G UACGGUAA | 1696 | UUACCCUA GCCGAAAGGCGAGUGAGGUCU UAUUAAGG | 1992 |
| 2296 | AUAGUAGG C UAAGUUGU | 1697 | ACAACUUA GCCGAAAGGCGAGUCAGGUCU CCUACUAU | 1993 |
| 2300 | UAGGGUAA G UUGUUAAG | 1698 | CUUAACAA GCCGAAAGGCGAGUGAGGUCU UUACCCUA | 1994 |
| 2303 | GGUAAGUU C UUAAGAGU | 1699 | ACUCUUAA GCCGAAACGCGAGUGAGCUCU AACUUACC | 1995 |
| 2310 | UGUUAAGA G UGGGGGAG | 1700 | CUCCCCCA GCCGAAAGGCGAGUGAGGUCU UCUUAACA | 1996 |
| 2320 | GGGGGAGA G CAGCCUGG | 1701 | CCAGCCUG GCCGAAAGGCGAGUGAGGUCU UCUCCCCC | 1997 |
| 2324 | GAGACCAC C CUGGCAGC | 1702 | GCUGCCAC GCCGAAAGGCCACUGAGGUCU CUGCUCUC | 1998 |
| 2328 | GCAGGCUG C CAGCUCUC | 1703 | GAGAGCUG GCCGAAAGGCGAGUGAGGUCU CAGCCUGC | 1999 |
| 2331 | CGCUGGCA C CUCUCCAG | 1704 | CUGGAGAG GCCCAAAGGCGAGUGAGGUCU UGCCAGCC | 2000 |
| 2339 | GCUCUCCA G UCAGGAGG | 1705 | CCUCCUGA GCCGAAAGGCGAGUGAGGUCU UGGAGAGC | 2001 |
| 2347 | GUCAGGAG C CAUAGUUU | 1706 | AAACUAUG GCCGAAAGGCGAGUGAGGUCU CUCCUGAC | 2002 |
| 2352 | GAGGCAUA G UUUUUAGU | 1707 | ACUAAAAA GCCGAAAGGCGAGUGAGGUCU UAUGCCUC | 2003 |
| 2359 | AGUUUUUA G UGAACAAU | 1708 | AUUGUUCA GCCGAAACGCGAGUGAGGUCU UAAAAACU | 2004 |
| 2372 | CAAUCAAA C CACUUGGA | 1709 | UCCAACUG GCCGAAAGGCGAGUGAGGUCU UUUGAUUG | 2005 |
| 2386 | GGACUCUU C CUCUUUCU | 1710 | ACAAACAG GCCGAAAGGCGAGUGACGUCU AAGAGUCC | 2006 |
| 2411 | CUAAUAAA C CUGUUCCC | 1711 | GCCAACAC GCCGAAAGGCGAGUGACCUCU UUUAUUAG | 2007 |
| 2414 | AUAAAGCU G UUCCCAAG | 1712 | CUUGGCAA CCCGAAAGGCGAGUGACCUCU AGCUUUAU | 2008 |
| 2417 | AAGCUGUU C CCAAGCUG | 1713 | CAGCUUGG GCCGAAAGGCGAGUGAGCUCU AACAGCUU | 2009 |
| 2422 | CUUGCCAA G CUGGACGG | 1714 | CCGUCCAC GCCCAAAGGCGACUGAGGUCU UUGGCAAC | 2010 |
| 2430 | GCUGGACG C CACGAGCU | 1715 | AGCUCCUC CCCGAAAGCCCACUGAGGUCU CCUCCACC | 2011 |
| 2436 | CGCCACCA C CUCCUGCC | 1716 | GCCACGAG GCCGAAAGGCCAGUCAGGUCU UCCUGCCG | 2012 |

Input Sequence = NM_021975. Cut Site = G/Y
Arm Length = 8. Core Sequence = GCcgaaagGCGaGUCaaGGUCU
NM_021975 (Homo sapiens p65 RelA (NFKB), mRNA; 2444 bp)

[0260] TABLE V
Human REL-A DNAzyme and Substrate Sequence

| | | Seq | | Seq |
|---|---|---|---|---|
| Pos | Substrate | ID | DNAzyzme | ID |
| 9 | GGCACGAG G CGGGGCCG | 1421 | CGGCCCCG GGCTAGCTACAACGA CTCGTGCC | 2151 |
| 14 | GAGGCGGG G CCGGGUCG | 1422 | CGACCCGG GGCTAGCTACAACGA CCCGCCTC | 2152 |
| 19 | GGGGCCGG G UCGCAGCU | 1423 | AGCTGCGA GGCTAGCTACAACGA CCGGCCCC | 2153 |
| 22 | GCCGGGUC G CAGCUGGG | 1424 | CCCAGCTG GGCTAGCTACAACGA GACCCGGC | 2154 |
| 25 | GGGUCGCA G CUGGGCCC | 1425 | GGGCCCAG GGCTAGCTACAACGA TGCGACCC | 2155 |
| 30 | GCAGCUGG G CCCGCGGC | 1426 | GCCGCGGG GGCTAGCTACAACGA CCAGCTGC | 2156 |
| 34 | CUGGGCCC G CGGCAUGG | 1427 | CCATGCCG GGCTAGCTACAACGA GGGCCCAG | 2157 |
| 37 | GGCCCGCG G CAUGGACG | 1428 | CGTCCATG GGCTAGCTACAACGA CGCGGGCC | 2158 |
| 39 | CCCGCGGC A UGGACGAA | 6 | TTCGTCCA GGCTAGCTACAACGA GCCGCGGG | 2159 |
| 43 | CGGCAUGG A CGAACUGU | 2013 | ACAGTTCG GGCTAGCTACAACGA CCATGCCG | 2160 |
| 47 | AUGGACGA A CUGUUCCC | 2014 | GGGAACAG GGCTAGCTACAACGA TCGTCCAT | 2161 |
| 50 | GACGAACU G UUCCCCCU | 1429 | AGGGGGAA GGCTAGCTACAACGA AGTTCGTC | 2162 |
| 60 | UCCCCCUC A UCUUCCCG | 13 | CGGGAAGA GGCTAGCTACAACGA GAGGGGGA | 2163 |
| 69 | UCUUCCCG G CAGAGCAG | 1430 | CTGCTCTG GGCTAGCTACAACGA CGGGAAGA | 2164 |
| 74 | CCGGCAGA G CAGCCCAA | 1431 | TTGGGCTG GGCTAGCTACAACGA TCTGCCGG | 2165 |
| 77 | GCAGAGCA G CCCAAGCA | 1432 | TGCTTGGG GGCTAGCTACAACGA TGCTCTGC | 2166 |
| 83 | CAGCCCAA G CAGCGGGG | 1433 | CCCCGCTG GGCTAGCTACAACGA TTGGGCTG | 2167 |
| 86 | CCCAAGCA G CGGGGCAU | 1434 | ATGCCCCG GGCTAGCTACAACGA TGCTTGGG | 2168 |
| 91 | GCAGCGGG G CAUGCGCU | 1435 | AGCGCATG GGCTAGCTACAACGA CCCGCTGC | 2169 |
| 93 | AGCGGGGC A UGCGCUUC | 23 | GAAGCGCA GGCTAGCTACAACGA GCCCCGCT | 2170 |
| 95 | CGGGGCAU G CGCUUCCG | 1436 | CGGAAGCG GGCTAGCTACAACGA ATGCCCCG | 2171 |
| 97 | GGGCAUGC G CUUCCGCU | 1437 | AGCGGAAG GGCTAGCTACAACGA GCATGCCC | 2172 |
| 103 | GCGCUUCC G CUACAAGU | 1438 | ACTTGTAG GGCTAGCTACAACGA GGAAGCGC | 2173 |
| 106 | CUUCCGCU A CAAGUGCG | 2015 | CGCACTTG GGCTAGCTACAACGA AGCGGAAG | 2174 |
| 110 | CGCUACAA G UGCGAGGG | 1439 | CCCTCGCA GGCTAGCTACAACGA TTGTAGCG | 2175 |
| 112 | CUACAAGU G CGAGGGGC | 1440 | GCCCCTCG GGCTAGCTACAACGA ACTTGTAG | 2176 |
| 119 | UGCGAGGG G CGCUCCGC | 1441 | GCGGAGCG GGCTAGCTACAACGA CCCTCGCA | 2177 |
| 121 | CGAGGCGC G CUCCGCGG | 1442 | CCGCGGAG GGCTAGCTACAACGA GCCCCTCG | 2178 |
| 126 | GGCGCUCC G CGGGCAGC | 1443 | GCTGCCCG GGCTAGCTACAACGA GGAGCGCC | 2179 |
| 130 | CUCCGCGG G CAGCAUCC | 1444 | GGATGCTG GGCTAGCTACAACGA CCGCGGAG | 2180 |
| 133 | CGCGGGCA G CAUCCCAG | 1445 | CTGGGATG GGCTAGCTACAACGA TGCCCGCG | 2181 |
| 135 | CGGGCAGC A UCCCAGGC | 31 | GCCTGGGA GGCTAGCTACAACGA GCTGCCCG | 2182 |
| 142 | CAUCCCAG G CGAGAGGA | 1446 | TCCTCTCG GGCTAGCTACAACGA CTGGGATG | 2183 |
| 151 | CGAGAGGA G CACAGAUA | 1447 | TATCTGTG GGCTAGCTACAACGA TCCTCTCG | 2184 |
| 153 | AGAGGAGC A CAGAUACC | 35 | GGTATCTG GGCTAGCTACAACGA GCTCCTCT | 2185 |
| 157 | GAGCACAG A UACCACCA | 2016 | TGGTGGTA GGCTAGCTACAACGA CTGTGCTC | 2186 |
| 159 | GCACAGAU A CCACCAAG | 2017 | CTTGGTGG GGCTAGCTACAACGA ATCTGTGC | 2187 |
| 162 | CAGAUACC A CCAAGACC | 38 | GGTCTTGG GGCTAGCTACAACGA GGTATCTG | 2188 |
| 168 | CCACCAAG A CCCACCCC | 2018 | GGGGTGGG GGCTAGCTACAACGA CTTGGTGG | 2189 |
| 172 | CAAGACCC A CCCCACCA | 43 | TGGTGGGG GGCTAGCTACAACGA GGGTCTTG | 2190 |
| 177 | CCCACCCC A CCAUCAAG | 47 | CTTGATGG GGCTAGCTACAACGA GGGGTGGG | 2191 |
| 180 | ACCCCACC A UCAAGAUC | 49 | GATCTTGA GGCTAGCTACAACGA GGTGGGGT | 2192 |
| 186 | CCAUCAAG A UCAAUGGC | 2019 | GCCATTGA GGCTAGCTACAACGA CTTGATGG | 2193 |
| 190 | CAAGAUCA A UGGCUACA | 2020 | TGTAGCCA GGCTAGCTACAACGA TGATCTTG | 2194 |
| 193 | GAUCAAUG G CUACACAG | 1448 | CTGTGTAG GGCTAGCTACAACGA CATTGATC | 2195 |
| 196 | CAAUGGCU A CACAGGAC | 2021 | GTCCTGTG GGCTAGCTACAACGA AGCCATTG | 2196 |
| 198 | AUGGCUAC A CAGGACCA | 53 | TGGTCCTG GGCTAGCTACAACGA GTAGCCAT | 2197 |
| 203 | UACACAGG A CCAGGGAC | 2022 | GTCCCTGG GGCTAGCTACAACGA CCTGTGTA | 2198 |
| 210 | GACCAGGG A CAGUGCGC | 2023 | GCGCACTG GGCTAGCTACAACGA CCCTGGTC | 2199 |
| 213 | CAGGGACA G UGCGCAUC | 1449 | GATGCGCA GGCTAGCTACAACGA TGTCCCTG | 2200 |
| 215 | GGGACAGU G CGCAUCUC | 1450 | GAGATGCG GGCTAGCTACAACGA ACTGTCCC | 2201 |
| 217 | GACAGUGC G CAUCUCCC | 1451 | GGGAGATG GGCTAGCTACAACGA GCACTGTC | 2202 |
| 219 | CAGUGCGC A UCUCCCUG | 58 | CAGGGAGA GGCTAGCTACAACGA GCGCACTG | 2203 |
| 228 | UCUCCCUG G UCACCAAG | 1452 | CTTGGTGA GGCTAGCTACAACGA CAGGGAGA | 2204 |
| 231 | CCCUGGUC A CCAAGGAC | 63 | GTCCTTGG GGCTAGCTACAACGA GACCAGGG | 2205 |
| 238 | CACCAAGG A CCCUCCUC | 2024 | GAGGAGGG GGCTAGCTACAACGA CCTTGGTG | 2206 |
| 247 | CCCUCCUC A CCGGCCUC | 71 | GAGGCCGG GGCTAGCTACAACGA GAGGAGGG | 2207 |
| 251 | CCUCACCG G CCUCACCC | 1453 | GGGTGAGG GGCTAGCTACAACGA CGGTGAGG | 2208 |
| 256 | CCGGCCUC A CCCCCACG | 75 | CGTGGGGG GGCTAGCTACAACGA GAGGCCGG | 2209 |
| 262 | UCACCCCC A CGAGCUUG | 80 | CAAGCTCG GGCTAGCTACAACGA GGGGGTGA | 2210 |
| 266 | CCCCACGA G CUUGUAGG | 1454 | CCTACAAG GGCTAGCTACAACGA TCGTGGGG | 2211 |
| 270 | ACGAGCUU G UAGGAAAG | 1455 | CTTTCCTA GGCTAGCTACAACGA AAGCTCGT | 2212 |
| 280 | AGCAAAGG A CUGCCGGG | 2025 | CCCGGCAG GGCTAGCTACAACGA CCTTTCCT | 2213 |
| 283 | AAAGGACU G CCGGGAUG | 1456 | CATCCCGG GGCTAGCTACAACGA AGTCCTTT | 2214 |
| 289 | CUGCCGGG A UGGCUUCU | 2026 | AGAAGCCA GGCTAGCTACAACGA CCCGGCAG | 2215 |
| 292 | CCGGGAUG G CUUCUAUG | 1457 | CATAGAAG GGCTAGCTACAACGA CATCCCGG | 2216 |
| 298 | UGGCUUCU A UGAGGCUG | 2027 | CAGCCTCA GGCTAGCTACAACGA AGAAGCCA | 2217 |
| 303 | UCUAUGAG G CUGAGCUC | 1458 | GAGCTCAG GGCTAGCTACAACGA CTCATAGA | 2218 |
| 308 | GAGGCUGA G CUCUGCCC | 1459 | GGGCAGAG GGCTAGCTACAACGA TCAGCCTC | 2219 |
| 313 | UGAGCUCU G CCCGGACC | 1460 | GGTCCGGG GGCTAGCTACAACGA AGAGCTCA | 2220 |
| 319 | CUGCCCGG A CCGCUGCA | 2028 | TGCAGCGG GGCTAGCTACAACGA CCGGGCAG | 2221 |
| 322 | CCCGGACC G CUGCAUCC | 1461 | GGATGCAG GGCTAGCTACAACGA GGTCCGGG | 2222 |
| 325 | GGACCGCU G CAUCCACA | 1462 | TGTGGATG GGCTAGCTACAACGA AGCGGTCC | 2223 |
| 327 | ACCGCUGC A UCCACAGU | 93 | ACTGTGGA GGCTAGCTACAACGA GCAGCGGT | 2224 |
| 331 | CUGCAUCC A CAGUUUCC | 95 | GGAAACTG GGCTAGCTACAACGA GGATGCAG | 2225 |
| 334 | CAUCCACA G UUUCCAGA | 1463 | TCTGGAAA GGCTAGCTACAACGA TGTGGATG | 2226 |
| 343 | UUUCCAGA A CCUGGGAA | 2029 | TTCCCAGG GGCTAGCTACAACGA TCTGGAAA | 2227 |
| 351 | ACCUGGGA A UCCAGUGU | 2030 | ACACTGGA GGCTAGCTACAACGA TCCCAGGT | 2228 |
| 356 | GGAAUCCA G UGUGUGAA | 1464 | TTCACACA GGCTAGCTACAACGA TGGATTCC | 2229 |
| 358 | AAUCCAGU G UGUGAAGA | 1465 | TCTTCACA GGCTAGCTACAACGA ACTGGATT | 2230 |
| 360 | UCCAGUGU G UGAAGAAG | 1466 | CTTCTTCA GGCTAGCTACAACGA ACACTGGA | 2231 |
| 368 | GUGAAGAA G CGGGACCU | 1467 | AGGTCCCG GGCTAGCTACAACGA TTCTTCAC | 2232 |
| 373 | GAAGCGGG A CCUGGAGC | 2031 | GCTCCAGG GGCTAGCTACAACGA CCCGCTTC | 2233 |
| 380 | GACCUGGA G CAGGCUAU | 1468 | ATAGCCTG GGCTAGCTACAACGA TCCAGGTC | 2234 |
| 384 | UGGAGCAG G CUAUCAGU | 1469 | ACTGATAG GGCTAGCTACAACGA CTGCTCCA | 2235 |
| 387 | AGCAGGCU A UCAGUCAG | 2032 | CTGACTGA GGCTAGCTACAACGA AGCCTGCT | 2236 |
| 391 | GGCUAUCA G UCAGCGCA | 1470 | TGCGCTGA GGCTAGCTACAACGA TGATAGCC | 2237 |
| 395 | AUCAGUCA G CGCAUCCA | 1471 | TGGATGCG GGCTAGCTACAACGA TGACTGAT | 2238 |
| 397 | CAGUCAGC G CAUCCAGA | 1472 | TCTGGATG GGCTAGCTACAACGA GCTGACTG | 2239 |
| 399 | GUCAGCGC A UCCAGACC | 109 | GGTCTGGA GGCTAGCTACAACGA GCGCTGAC | 2240 |
| 405 | GCAUCCAG A CCAACAAC | 2033 | GTTGTTGG GGCTAGCTACAACGA CTGGATGC | 2241 |
| 409 | CCAGACCA A CAACAACC | 2034 | GGTTGTTG GGCTAGCTACAACGA TGGTCTGG | 2242 |
| 412 | GACCAACA A CAACCCCU | 2035 | AGGGGTTG GGCTAGCTACAACGA TGTTGGTC | 2243 |
| 415 | CAACAACA A CCCCUUCC | 2036 | GGAAGGGG GGCTAGCTACAACGA TGTTGTTG | 2244 |
| 426 | CCUUCCAA G UUCCUAUA | 1473 | TATAGGAA GGCTAGCTACAACGA TTGGAAGG | 2245 |
| 432 | AAGUUCCU A UAGAAGAG | 2037 | CTCTTCTA GGCTAGCTACAACGA AGGAACTT | 2246 |
| 440 | AUAGAAGA G CAGCGUGG | 1474 | CCACGCTG GGCTAGCTACAACGA TCTTCTAT | 2247 |
| 443 | GAAGAGCA G CGUGGGGA | 1475 | TCCCCACG GGCTAGCTACAACGA TGCTCTTC | 2248 |
| 445 | AGAGCAGC G UGGGGACU | 1476 | AGTCCCCA GGCTAGCTACAACGA GCTGCTCT | 2249 |
| 451 | GCGUGGGG A CUACGACC | 2038 | GGTCGTAG GGCTAGCTACAACGA CCCCACGC | 2250 |
| 454 | UGGGGACU A CGACCUGA | 2039 | TCAGGTCG GGCTAGCTACAACGA AGTCCCCA | 2251 |
| 457 | GGACUACG A CCUGAAUG | 2040 | CATTCAGG GGCTAGCTACAACGA CGTAGTCC | 2252 |
| 463 | CGACCUGA A UGCUGUGC | 2041 | GCACAGCA GGCTAGCTACAACGA TCAGGTCG | 2253 |
| 465 | ACCUCAAU G CUGUGCGG | 1477 | CCGCACAG GGCTAGCTACAACGA ATTCAGGT | 2254 |
| 468 | UGAAUGCU G UGCGGCUC | 1478 | GAGCCGCA GGCTAGCTACAACGA AGCATTCA | 2255 |
| 470 | AAUGCUGU G CGGCUCUG | 1479 | CAGAGCCG GGCTAGCTACAACGA ACAGCATT | 2256 |
| 473 | GCUGUGCG G CUCUGCUU | 1480 | AAGCAGAG GGCTAGCTACAACGA CGCACAGC | 2257 |
| 478 | GCGGCUCU G CUUCCAGG | 1481 | CCTGGAAG GGCTAGCTACAACGA AGAGCCGC | 2258 |
| 486 | GCUUCCAG G UGACAGUG | 1482 | CACTGTCA GGCTAGCTACAACGA CTGGAAGC | 2259 |
| 489 | UCCAGGUG A CAGUGCGG | 2042 | CCGCACTG GGCTAGCTACAACGA CACCTGGA | 2260 |
| 492 | AGGUGACA G UGCGGGAC | 1483 | GTCCCGCA GGCTAGCTACAACGA TGTCACCT | 2261 |
| 494 | GUGACAGU G CGGGACCC | 1484 | GGGTCCCG GGCTAGCTACAACGA ACTGTCAC | 2262 |
| 499 | AGUGCGGG A CCCAUCAG | 2043 | CTGATGGG GGCTAGCTACAACGA CCCGCACT | 2263 |
| 503 | CGGGACCC A UCAGGCAG | 137 | CTGCCTGA GGCTAGCTACAACGA GGGTCCCG | 2264 |
| 508 | CCCAUCAG G CAGGCCCC | 1485 | GGGGCCTG GGCTAGCTACAACGA CTGATGGG | 2265 |
| 512 | UCAGGCAG G CCCCUCCG | 1486 | CGGAGGGG GGCTAGCTACAACGA CTGCCTGA | 2266 |
| 520 | GCCCCUCC G CCUGCCGC | 1487 | GCGGCAGG GGCTAGCTACAACGA GGAGGGGC | 2267 |
| 524 | CUCCGCCU G CCGCCUGU | 1488 | ACAGGCGG GGCTAGCTACAACGA AGGCGGAG | 2268 |
| 527 | CGCCUGCC G CCUGUCCU | 1489 | AGGACAGG GGCTAGCTACAACGA GGCAGGCG | 2269 |
| 531 | UGCCGCCU G UCCUUUCU | 1490 | AGAAAGGA GGCTAGCTACAACGA AGGCGGCA | 2270 |
| 541 | CCUUUCUC A UCCCAUCU | 153 | AGATGGGA GGCTAGCTACAACGA GAGAAAGG | 2271 |
| 546 | CUCAUCCC A UCUUUGAC | 156 | GTCAAAGA GGCTAGCTACAACGA GGGATGAG | 2272 |
| 553 | CAUCUUUG A CAAUCGUG | 2044 | CACGATTG GGCTAGCTACAACGA CAAAGATG | 2273 |
| 556 | CUUUGACA A UCGUGCCC | 2045 | GGGCACGA GGCTAGCTACAACGA TGTCAAAG | 2274 |
| 559 | UGACAAUC G UGCCCCCA | 1491 | TGGGGGCA GGCTAGCTACAACGA GATTGTCA | 2275 |
| 561 | ACAAUCGU G CCCCCAAC | 1492 | GTTGGGGG GGCTAGCTACAACGA ACGATTGT | 2276 |
| 568 | UGCCCCCA A CACUGCCG | 2046 | CGGCAGTG GGCTAGCTACAACGA TGGGGGCA | 2277 |
| 570 | CCCCCAAC A CUGCCGAG | 164 | CTCGGCAG GGCTAGCTACAACGA GTTGGGGG | 2278 |
| 573 | CCAACACU G CCGAGCUC | 1493 | GAGCTCGG GGCTAGCTACAACGA AGTGTTGG | 2279 |
| 578 | ACUGCCGA G CUCAAGAU | 1494 | ATCTTGAG GGCTAGCTACAACGA TCGGCAGT | 2280 |
| 585 | AGCUCAAG A UCUGCCGA | 2047 | TCGGCAGA GGCTAGCTACAACGA CTTGAGCT | 2281 |
| 589 | CAAGAUCU G CCGAGUGA | 1495 | TCACTCGG GGCTAGCTACAACGA AGATCTTG | 2282 |
| 594 | UCUGCCGA G UGAACCGA | 1496 | TCGGTTCA GGCTAGCTACAACGA TCGGCAGA | 2283 |
| 598 | CCGAGUGA A CCGAAACU | 2048 | AGTTTCGG GGCTAGCTACAACGA TCACTCGG | 2284 |
| 604 | GAACCGAA A CUCUGGCA | 2049 | TGCCAGAG GGCTAGCTACAACGA TTCGGTTC | 2285 |
| 610 | AAACUCUG G CAGCUGCC | 1497 | GGCAGCTG GGCTAGCTACAACGA CAGAGTTT | 2286 |
| 613 | CUCUGGCA G CUGCCUCG | 1498 | CGAGGCAG GGCTAGCTACAACGA TGCCAGAG | 2287 |
| 616 | UGGCAGCU G CCUCGGUG | 1499 | CACCGAGG GGCTAGCTACAACGA AGCTGCCA | 2288 |
| 622 | CUGCCUCG G UGGGGAUG | 1500 | CATCCCCA GGCTAGCTACAACGA CGAGGCAG | 2289 |
| 628 | CGGUGGGG A UGAGAUCU | 2050 | AGATCTCA GGCTAGCTACAACGA CCCCACCG | 2290 |
| 633 | GGGAUGAG A UCUUCCUA | 2051 | TAGGAAGA GGCTAGCTACAACGA CTCATCCC | 2291 |
| 641 | AUCUUCCU A CUGUGUGA | 2052 | TCACACAG GGCTAGCTACAACGA AGGAAGAT | 2292 |
| 644 | UUCCUACU G UGUGACAA | 1501 | TTGTCACA GGCTAGCTACAACGA AGTAGGAA | 2293 |
| 646 | CCUACUGU G UGACAAGG | 1502 | CCTTGTCA GGCTAGCTACAACGA ACAGTAGG | 2294 |
| 649 | ACUGUGUG A CAAGGUGC | 2053 | GCACCTTG GGCTAGCTACAACGA CACACAGT | 2295 |
| 654 | GUGACAAG G UGCAGAAA | 1503 | TTTCTGCA GGCTAGCTACAACGA CTTGTCAC | 2296 |
| 656 | GACAAGGU G CAGAAAGA | 1504 | TCTTTCTG GGCTAGCTACAACGA ACCTTGTC | 2297 |
| 667 | GAAAGAGG A CAUUGAGG | 2054 | CCTCAATG GGCTAGCTACAACGA CCTCTTTC | 2298 |
| 669 | AAGAGGAC A UUGAGGUG | 184 | CACCTCAA GGCTAGCTACAACGA GTCCTCTT | 2299 |
| 675 | ACAUUGAG G UGUAUUUC | 1505 | GAAATACA GGCTAGCTACAACGA CTCAATGT | 2300 |
| 677 | AUUGAGGU G UAUUUCAC | 1506 | GTGAAATA GGCTAGCTACAACGA ACCTCAAT | 2301 |
| 679 | UGAGGUGU A UUUCACGG | 2055 | CCGTGAAA GGCTAGCTACAACGA ACACCTCA | 2302 |
| 684 | UGUAUUUC A CGGGACCA | 185 | TGGTCCCG GGCTAGCTACAACGA GAAATACA | 2303 |
| 689 | UUCACGGG A CCAGGCUG | 2056 | CAGCCTGG GGCTAGCTACAACGA CCCGTGAA | 2304 |
| 694 | GGGACCAG G CUGGGAGG | 1507 | CCTCCCAG GGCTAGCTACAACGA CTGGTCCC | 2305 |
| 702 | GCUGGGAG G CCCGAGGC | 1508 | GCCTCGGG GGCTAGCTACAACGA CTCCCAGC | 2306 |
| 709 | GGCCCGAG G CUCCUUUU | 1509 | AAAAGGAG GGCTAGCTACAACGA CTCGGGCC | 2307 |
| 719 | UCCUUUUC G CAAGCUGA | 1510 | TCAGCTTG GGCTAGCTACAACGA GAAAAGGA | 2308 |
| 723 | UUUCGCAA G CUGAUGUG | 1511 | CACATCAG GGCTAGCTACAACGA TTGCGAAA | 2309 |
| 727 | GCAAGCUG A UGUGCACC | 2057 | GGTGCACA GGCTAGCTACAACGA CAGCTTGC | 2310 |
| 729 | AAGCUGAU G UGCACCGA | 1512 | TCGGTGCA GGCTAGCTACAACGA ATCAGCTT | 2311 |
| 731 | GCUGAUGU G CACCGACA | 1513 | TGTCGGTG GGCTAGCTACAACGA ACATCAGC | 2312 |
| 733 | UGAUGUGC A CCGACAAG | 196 | CTTGTCGG GGCTAGCTACAACGA GCACATCA | 2313 |
| 737 | GUGCACCG A CAAGUGGC | 2058 | GCCACTTG GGCTAGCTACAACGA CGGTGCAC | 2314 |
| 741 | ACCGACAA G UGGCCAUU | 1514 | AATGGCCA GGCTAGCTACAACGA TTGTCGGT | 2315 |
| 744 | GACAAGUG G CCAUUGUG | 1515 | CACAATGG GGCTAGCTACAACGA CACTTGTC | 2316 |
| 747 | AAGUGGCC A UUGUGUUC | 200 | GAACACAA GGCTAGCTACAACGA GGCCACTT | 2317 |
| 750 | UGGCCAUU G UGUUCCGG | 1516 | CCGGAACA GGCTAGCTACAACGA AATGGCCA | 2318 |
| 752 | GCCAUUGU G UUCCGGAC | 1517 | GTCCGGAA GGCTAGCTACAACGA ACAATGGC | 2319 |
| 759 | UGUUCCGG A CCCCUCCC | 2059 | GGGAGGGG GGCTAGCTACAACGA CCGGAACA | 2320 |
| 769 | CCCUCCCU A CGCAGACC | 2060 | GGTCTGCG GGCTAGCTACAACGA AGGGAGGG | 2321 |
| 771 | CUCCCUAC G CAGACCCC | 1518 | GGGGTCTG GGCTAGCTACAACGA GTAGGGAG | 2322 |
| 775 | CUACGCAG A CCCCAGCC | 2061 | GGCTGGGG GGCTAGCTACAACGA CTGCGTAG | 2323 |
| 781 | AGACCCCA G CCUGCAGG | 1519 | CCTGCAGG GGCTAGCTACAACGA TGGGGTCT | 2324 |
| 785 | CCCAGCCU G CAGGCUCC | 1520 | GGAGCCTG GGCTAGCTACAACGA AGGCTGGG | 2325 |
| 789 | GCCUGCAG G CUCCUGUG | 1521 | CACAGGAG GGCTAGCTACAACGA CTGCAGGC | 2326 |
| 795 | AGGCUCCU G UGCGUGUC | 1522 | GACACGCA GGCTAGCTACAACGA AGGAGCCT | 2327 |
| 797 | GCUCCUGU G CGUGUCUC | 1523 | GAGACACG GGCTAGCTACAACGA ACAGGAGC | 2328 |
| 799 | UCCUGUGC G UGUCUCCA | 1524 | TGGAGACA GGCTAGCTACAACGA GCACAGGA | 2329 |
| 801 | CUGUGCGU G UCUCCAUG | 1525 | CATGGAGA GGCTAGCTACAACGA ACGCACAG | 2330 |
| 807 | GUGUCUCC A UGCAGCUG | 222 | CAGCTGCA GGCTAGCTACAACGA GGAGACAC | 2331 |
| 809 | GUCUCCAU G CAGCUGCG | 1526 | CGCAGCTG GGCTAGCTACAACGA ATGGAGAC | 2332 |
| 812 | UCCAUGCA G CUGCGGCG | 1527 | CGCCGCAG GGCTAGCTACAACGA TGCATGGA | 2333 |
| 815 | AUGCAGCU G CCGCGGCC | 1528 | GGCCGCCG GGCTAGCTACAACGA AGCTGCAT | 2334 |
| 818 | CAGCUGCG G CGGCCUUC | 1529 | GAAGGCCG GGCTAGCTACAACGA CGCAGCTG | 2335 |
| 821 | CUGCGGCG G CCUUCCGA | 1530 | TCGGAAGG GGCTAGCTACAACGA CGCCGCAG | 2336 |
| 829 | GCCUUCCG A CCGGGAGC | 2062 | GCTCCCGG GGCTAGCTACAACGA CGGAAGGC | 2337 |
| 836 | GACCGGGA G CUCAGUGA | 1531 | TCACTGAG GGCTAGCTACAACGA TCCCGGTC | 2338 |
| 841 | GGAGCUCA G UGAGCCCA | 1532 | TGGGCTCA GGCTAGCTACAACGA TGAGCTCC | 2339 |
| 845 | CUCAGUGA G CCCAUGGA | 1533 | TCCATGGG GGCTAGCTACAACGA TCACTGAG | 2340 |
| 849 | GUGAGCCC A UGGAAUUC | 233 | GAATTCCA GGCTAGCTACAACGA GGGCTCAC | 2341 |
| 854 | CCCAUGGA A UUCCAGUA | 2063 | TACTGGAA GGCTAGCTACAACGA TCCATGGG | 2342 |
| 860 | GAAUUCCA G UACCUGCC | 1534 | GGCAGGTA GGCTAGCTACAACGA TGGAATTC | 2343 |
| 862 | AUUCCAGU A CCUGCCAG | 2064 | CTGGCAGG GGCTAGCTACAACGA ACTGGAAT | 2344 |
| 866 | CAGUACCU G CCAGAUAC | 1535 | GTATCTGG GGCTAGCTACAACGA AGGTACTG | 2345 |
| 871 | CCUGCCAG A UACAGACG | 2065 | CGTCTGTA GGCTAGCTACAACGA CTGGCAGG | 2346 |
| 873 | UGCCAGAU A CAGACGAU | 2066 | ATCGTCTG GGCTAGCTACAACGA ATCTGGCA | 2347 |
| 877 | AGAUACAG A CGAUCGUC | 2067 | GACGATCG GGCTAGCTACAACGA CTGTATCT | 2348 |
| 880 | UACAGACG A UCGUCACC | 2068 | GGTGACGA GGCTAGCTACAACGA CGTCTGTA | 2349 |
| 883 | AGACCAUC G UCACCGGA | 1536 | TCCGGTGA GGCTAGCTACAACGA GATCCTCT | 2350 |
| 886 | CGAUCGUC A CCGGAUUG | 241 | CAATCCGG GGCTAGCTACAACGA GACGATCG | 2351 |
| 891 | GUCACCGG A UUGAGGAG | 2069 | CTCCTCAA GGCTAGCTACAACGA CCGGTGAC | 2352 |
| 902 | GAGGAGAA A CGUAAAAG | 2070 | CTTTTACG GGCTAGCTACAACGA TTCTCCTC | 2353 |
| 904 | GGAGAAAC G UAAAAGGA | 1537 | TCCTTTTA GGCTAGCTACAACGA GTTTCTCC | 2354 |
| 912 | GUAAAAGG A CAUAUGAG | 2071 | CTCATATG GGCTAGCTACAACGA CCTTTTAC | 2355 |
| 914 | AAAAGGAC A UAUGAGAC | 243 | GTCTCATA GGCTAGCTACAACGA GTCCTTTT | 2356 |
| 916 | AAGGACAU A UGAGACCU | 2072 | AGGTCTCA GGCTAGCTACAACGA ATGTCCTT | 2357 |
| 921 | CAUAUGAG A CCUUCAAG | 2073 | CTTGAAGG GGCTAGCTACAACGA CTCATATG | 2358 |
| 931 | CUUCAAGA G CAUCAUGA | 1538 | TCATGATG GGCTAGCTACAACGA TCTTGAAG | 2359 |
| 933 | UCAAGAGC A UCAUGAAG | 247 | CTTCATGA GGCTAGCTACAACGA GCTCTTGA | 2360 |
| 936 | AGAGCAUC A UGAAGAAG | 248 | CTTCTTCA GGCTAGCTACAACGA GATGCTCT | 2361 |
| 946 | GAAGAAGA G UCCUUUCA | 1539 | TGAAAGGA GGCTAGCTACAACGA TCTTCTTC | 2362 |
| 955 | UCCUUUCA G CGGACCCA | 1540 | TGGGTCCG GGCTAGCTACAACGA TGAAAGGA | 2363 |
| 959 | UUCAGCGG A CCCACCGA | 2074 | TCGGTGGG GGCTAGCTACAACGA CCGCTGAA | 2364 |
| 963 | GCGGACCC A CCGACCCC | 254 | GGGGTCGG GGCTAGCTACAACGA GGGTCCGC | 2365 |
| 967 | ACCCACCG A CCCCCGGC | 2075 | GCCGGGGG GGCTAGCTACAACGA CGGTGGGT | 2366 |
| 974 | GACCCCCG G CCUCCACC | 1541 | GGTGGAGG GGCTAGCTACAACGA CGGGGGTC | 2367 |
| 980 | CGGCCUCC A CCUCGACG | 263 | CGTCGAGG GGCTAGCTACAACGA GGAGGCCG | 2368 |
| 986 | CCACCUCG A CGCAUUGC | 2076 | GCAATGCG GGCTAGCTACAACGA CGAGGTGG | 2369 |
| 988 | ACCUCGAC G CAUUGCUG | 1542 | CAGCAATG GGCTAGCTACAACGA GTCGAGGT | 2370 |
| 990 | CUCGACGC A UUGCUGUG | 266 | CACAGCAA GGCTAGCTACAACGA GCGTCGAG | 2371 |
| 993 | GACGCAUU G CUGUGCCU | 1543 | AGGCACAG GGCTAGCTACAACGA AATGCGTC | 2372 |
| 996 | GCAUUGCU G UGCCUUCC | 1544 | GGAAGGCA GGCTAGCTACAACGA AGCAATGC | 2373 |
| 998 | AUUGCUGU G CCUUCCCG | 1545 | CGGGAAGG GGCTAGCTACAACGA ACAGCAAT | 2374 |
| 1006 | GCCUUCCC G CAGCUCAG | 1546 | CTGAGCTG GGCTAGCTACAACGA GGGAAGGC | 2375 |
| 1009 | UUCCCGCA G CUCAGCUU | 1547 | AAGCTGAG GGCTAGCTACAACGA TGCGGGAA | 2376 |
| 1014 | GCAGCUCA G CUUCUGUC | 1548 | GACAGAAG GGCTAGCTACAACGA TGAGCTGC | 2377 |
| 1020 | CAGCUUCU G UCCCCAAG | 1549 | CTTGGGGA GGCTAGCTACAACGA AGAAGCTG | 2378 |
| 1028 | GUCCCCAA G CCAGCACC | 1550 | GGTGCTGG GGCTAGCTACAACGA TTGGGGAC | 2379 |
| 1032 | CCAAGCCA G CACCCCAG | 1551 | CTGGGGTG GGCTAGCTACAACGA TGGCTTGG | 2380 |
| 1034 | AAGCCAGC A CCCCAGCC | 283 | GGCTGGGG GGCTAGCTACAACGA GCTGGCTT | 2381 |
| 1040 | GCACCCCA G CCCUAUCC | 1552 | GGATAGGG GGCTAGCTACAACGA TGGGGTGC | 2382 |
| 1045 | CCAGCCCU A UCCCUUUA | 2077 | TAAAGGGA GGCTAGCTACAACGA AGGGCTGG | 2383 |
| 1053 | AUCCCUUU A CGUCAUCC | 2078 | GGATGACG GGCTAGCTACAACGA AAAGGGAT | 2384 |
| 1055 | CCCUUUAC G UCAUCCCU | 1553 | AGGGATGA GGCTAGCTACAACGA GTAAAGGG | 2385 |
| 1058 | UUUACGUC A UCCCUGAG | 294 | CTCAGGGA GGCTAGCTACAACGA GACGTAAA | 2386 |
| 1066 | AUCCCUGA G CACCAUCA | 1554 | TGATGGTG GGCTAGCTACAACGA TCAGGGAT | 2387 |
| 1068 | CCCUGAGC A CCAUCAAC | 298 | GTTGATGG GGCTAGCTACAACGA GCTCAGGG | 2388 |
| 1071 | UGAGCACC A UCAACUAU | 300 | ATAGTTGA GGCTAGCTACAACGA GGTGCTCA | 2389 |
| 1075 | CACCAUCA A CUAUGAUG | 2079 | CATCATAG GGCTAGCTACAACGA TGATGGTG | 2390 |
| 1078 | CAUCAACU A UGAUGAGU | 2080 | ACTCATCA GGCTAGCTACAACGA AGTTGATG | 2391 |
| 1081 | CAACUAUG A UGAGUUUC | 2081 | GAAACTCA GGCTAGCTACAACGA CATAGTTG | 2392 |
| 1085 | UAUGAUGA G UUUCCCAC | 1555 | GTGGGAAA GGCTAGCTACAACGA TCATCATA | 2393 |
| 1092 | AGUUUCCC A CCAUGGUG | 305 | CACCATGG GGCTAGCTACAACGA GGGAAACT | 2394 |
| 1095 | UUCCCACC A UGGUGUUU | 307 | AAACACCA GGCTAGCTACAACGA GGTGGGAA | 2395 |
| 1098 | CCACCAUG G UGUUUCCU | 1556 | AGGAAACA GGCTAGCTACAACGA CATGGTGG | 2396 |
| 1100 | ACCAUGGU G UUUCCUUC | 1557 | GAAGGAAA GGCTAGCTACAACGA ACCATGGT | 2397 |
| 1112 | CCUUCUGG G CAGAUCAG | 1558 | CTGATCTG GGCTAGCTACAACGA CCAGAAGG | 2398 |
| 1116 | CUGGGCAG A UCAGCCAG | 2082 | CTGGCTGA GGCTAGCTACAACGA CTGCCCAG | 2399 |
| 1120 | GCAGAUCA G CCAGGCCU | 1559 | AGGCCTGG GGCTAGCTACAACGA TGATCTGC | 2400 |
| 1125 | UCAGCCAG G CCUCGGCC | 1560 | GGCCGAGG GGCTAGCTACAACGA CTGGCTGA | 2401 |
| 1131 | AGGCCUCG G CCUUGGCC | 1561 | GGCCAAGG GGCTAGCTACAACGA CGAGGCCT | 2402 |
| 1137 | CGGCCUUG G CCCCGGCC | 1562 | GGCCGGGG GGCTAGCTACAACGA CAAGGCCG | 2403 |
| 1143 | UGGCCCCG G CCCCUCCC | 1563 | GGGAGGGG GGCTAGCTACAACGA CGGGGCCA | 2404 |
| 1155 | CUCCCCAA G UCCUGCCC | 1564 | GGGCAGGA GGCTAGCTACAACGA TTGGGGAG | 2405 |
| 1160 | CAAGUCCU G CCCCAGGC | 1565 | GCCTGGGG GGCTAGCTACAACGA AGGACTTG | 2406 |
| 1167 | UGCCCCAG G CUCCAGCC | 1566 | GGCTGGAG GGCTAGCTACAACGA CTGGGGCA | 2407 |
| 1173 | AGGCUCCA G CCCCUGCC | 1567 | GGCAGGGG GGCTAGCTACAACGA TGGAGCCT | 2408 |
| 1179 | CAGCCCCU G CCCCUGCU | 1568 | AGCAGGGG GGCTAGCTACAACGA AGGGGCTG | 2409 |
| 1185 | CUGCCCCU G CUCCAGCC | 1569 | GGCTGGAG GGCTAGCTACAACGA AGGCGCAG | 2410 |
| 1191 | CUGCUCCA G CCAUGGUA | 1570 | TACCATGG GGCTAGCTACAACGA TGGAGCAG | 2411 |
| 1194 | CUCCAGCC A UGGUAUCA | 351 | TGATACCA GGCTAGCTACAACGA GGCTGGAG | 2412 |
| 1197 | CAGCCAUG G UAUCAGCU | 1571 | AGCTGATA GGCTAGCTACAACGA CATGGCTG | 2413 |
| 1199 | GCCAUGGU A UCAGCUCU | 2083 | AGAGCTGA GGCTAGCTACAACGA ACCATGGC | 2414 |
| 1203 | UGGUAUCA G CUCUGGCC | 1572 | GGCCAGAG GGCTAGCTACAACGA TGATACCA | 2415 |
| 1209 | CAGCUCUG G CCCAGGCC | 1573 | GGCCTGGG GGCTAGCTACAACGA CAGAGCTG | 2416 |
| 1215 | UGGCCCAG G CCCCAGCC | 1574 | GGCTGGGG GGCTAGCTACAACGA CTGGGCCA | 2417 |
| 1221 | AGGCCCCA G CCCCUGUC | 1575 | GACAGGGG GGCTAGCTACAACGA TGGGGCCT | 2418 |
| 1227 | CAGCCCCU G UCCCAGUC | 1576 | GACTGGGA GGCTAGCTACAACGA AGGGGCTG | 2419 |
| 1233 | CUGUCCCA G UCCUAGCC | 1577 | GGCTAGGA GGCTAGCTACAACGA TGGGACAG | 2420 |
| 1239 | CAGUCCUA G CCCCAGGC | 1578 | GCCTGGGG GGCTAGCTACAACGA TAGGACTG | 2421 |
| 1246 | AGCCCCAG G CCCUCCUC | 1579 | CAGGAGGG GGCTAGCTACAACGA CTGCGGCT | 2422 |
| 1257 | CUCCUCAG G CUGUGGCC | 1580 | GGCCACAG GGCTAGCTACAACGA CTGAGGAG | 2423 |
| 1260 | CUCAGGCU G UGGCCCCA | 1581 | TGGGGCCA GGCTAGCTACAACGA AGCCTGAG | 2424 |
| 1263 | AGGCUGUG G CCCCACCU | 1582 | AGGTGGGG GGCTAGCTACAACGA CACAGCCT | 2425 |
| 1268 | GUGGCCCC A CCUGCCCC | 385 | GGGGCAGG GGCTAGCTACAACGA GGGGCCAC | 2426 |
| 1272 | CCCCACCU G CCCCCAAG | 1583 | CTTGGGGG GGCTAGCTACAACGA AGGTGGGG | 2427 |
| 1280 | GCCCCCAA G CCCACCCA | 1584 | TGGGTGGG GGCTAGCTACAACGA TTGGGGGC | 2428 |
| 1284 | CCAAGCCC A CCCAGGCU | 395 | AGCCTGGG GGCTAGCTACAACGA GGGCTTGG | 2429 |
| 1290 | CCACCCAG G CUGGGGAA | 1585 | TTCCCCAG GGCTAGCTACAACGA CTGGGTGG | 2430 |
| 1302 | GGGAAGGA A CGCUGUCA | 2084 | TGACAGCG GGCTAGCTACAACGA TCCTTCCC | 2431 |
| 1304 | GAAGGAAC G CUGUCAGA | 1586 | TCTGACAG GGCTAGCTACAACGA GTTCCTTC | 2432 |
| 1307 | GGAACGCU G UCAGAGGC | 1587 | GCCTCTGA GGCTAGCTACAACGA AGCGTTCC | 2433 |
| 1314 | UGUCAGAG G CCCUGCUG | 1588 | CAGCAGGG GGCTAGCTACAACGA CTCTGACA | 2434 |
| 1319 | GAGGCCCU G CUGCAGCU | 1589 | AGCTGCAG GGCTAGCTACAACGA AGGGCCTC | 2435 |
| 1322 | GCCCUGCU G CAGCUGCA | 1590 | TGCAGCTG GGCTAGCTACAACGA AGCAGGGC | 2436 |
| 1325 | CUGCUGCA G CUGCAGUU | 1591 | AACTGCAG GGCTAGCTACAACGA TGCAGCAG | 2437 |
| 1328 | CUGCAGCU G CAGUUUGA | 1592 | TCAAACTG GGCTAGCTACAACGA AGCTGCAG | 2438 |
| 1331 | CAGCUGCA G UUUGAUGA | 1593 | TCATCAAA GGCTAGCTACAACGA TGCAGCTG | 2439 |
| 1336 | GCAGUUUG A UGAUGAAG | 2085 | CTTCATCA GGCTAGCTACAACGA CAAACTGC | 2440 |
| 1339 | GUUUGAUG A UGAAGACC | 2086 | GGTCTTCA GGCTAGCTACAACGA CATCAAAC | 2441 |
| 1345 | UGAUGAAG A CCUGGGGG | 2087 | CCCCCAGG GGCTAGCTACAACGA CTTCATCA | 2442 |
| 1353 | ACCUGGGG G CCUUGCUU | 1594 | AAGCAAGG GGCTAGCTACAACGA CCCCAGGT | 2443 |
| 1358 | GGGGCCUU G CUUGGCAA | 1595 | TTGCCAAG GGCTAGCTACAACGA AAGGCCCC | 2444 |
| 1363 | CUUGCUUG G CAACAGCA | 1596 | TGCTGTTG GGCTAGCTACAACGA CAAGCAAG | 2445 |
| 1366 | GCUUGGCA A CAGCACAG | 2088 | CTGTGCTG GGCTAGCTACAACGA TGCCAAGC | 2446 |
| 1369 | UGGCAACA G CACAGACC | 1597 | GGTCTGTG GGCTAGCTACAACGA TGTTGCCA | 2447 |
| 1371 | GCAACAGC A CAGACCCA | 416 | TGGGTCTG GGCTAGCTACAACGA GCTGTTGC | 2448 |
| 1375 | CAGCACAG A CCCAGCUG | 2089 | CAGCTGGG GGCTAGCTACAACGA CTGTGCTG | 2449 |
| 1380 | CAGACCCA G CUGUGUUC | 1598 | GAACACAG GGCTAGCTACAACGA TGGGTCTG | 2450 |
| 1383 | ACCCAGCU G UGUUCACA | 1599 | TGTGAACA GGCTAGCTACAACGA AGCTGGGT | 2451 |
| 1385 | CCAGCUGU G UUCACAGA | 1600 | TCTGTGAA GGCTAGCTACAACGA ACAGCTGG | 2452 |
| 1389 | CUGUGUUC A CAGACCUG | 422 | CAGGTCTG GGCTAGCTACAACGA GAACACAG | 2453 |
| 1393 | GUUCACAG A CCUGGCAU | 2090 | ATGCCAGG GGCTAGCTACAACGA CTGTGAAC | 2454 |
| 1398 | CAGACCUG G CAUCCGUC | 1601 | GACGGATG GGCTAGCTACAACGA CAGGTCTG | 2455 |
| 1400 | GACCUGGC A UCCGUCGA | 426 | TCGACGGA GGCTAGCTACAACGA GCCAGGTC | 2456 |
| 1404 | UGGCAUCC G UCGACAAC | 1602 | GTTGTCGA GGCTAGCTACAACGA GGATGCCA | 2457 |
| 1408 | AUCCGUCG A CAACUCCG | 2091 | CGGAGTTG GGCTAGCTACAACGA CGACGGAT | 2458 |
| 1411 | CGUCGACA A CUCCGAGU | 2092 | ACTCGGAG GGCTAGCTACAACGA TGTCGACG | 2459 |
| 1418 | AACUCCGA G UUUCAGCA | 1603 | TGCTGAAA GGCTAGCTACAACGA TCGGAGTT | 2460 |
| 1424 | GAGUUUCA G CAGCUGCU | 1604 | AGCAGCTG GGCTAGCTACAACGA TGAAACTC | 2461 |
| 1427 | UUUCAGCA G CUGCUGAA | 1605 | TTCAGCAG GGCTAGCTACAACGA TGCTGAAA | 2462 |
| 1430 | CAGCAGCU G CUGAACCA | 1606 | TGGTTCAG GGCTAGCTACAACGA AGCTGCTG | 2463 |
| 1435 | GCUGCUGA A CCAGGGCA | 2093 | TGCCCTGG GGCTAGCTACAACGA TCAGCAGC | 2464 |
| 1441 | GAACCAGG G CAUACCUG | 1607 | CAGGTATG GGCTAGCTACAACGA CCTGGTTC | 2465 |
| 1443 | ACCAGGGC A UACCUGUG | 437 | CACAGGTA GGCTAGCTACAACGA GCCCTGGT | 2466 |
| 1445 | CAGGGCAU A CCUGUGGC | 2094 | GCCACAGG GGCTAGCTACAACGA ATGCCCTG | 2467 |
| 1449 | GCAUACCU G UGGCCCCC | 1608 | GGGGGCCA GGCTAGCTACAACGA AGGTATGC | 2468 |
| 1452 | UACCUGUG G CCCCCCAC | 1609 | GTGGGGGG GGCTAGCTACAACGA CACAGGTA | 2469 |
| 1459 | GGCCCCCC A CACAACUG | 445 | CAGTTGTG GGCTAGCTACAACGA GGGGGGCC | 2470 |
| 1461 | CCCCCCAC A CAACUGAG | 446 | CTCAGTTG GGCTAGCTACAACGA GTGGGGGG | 2471 |
| 1464 | CCCACACA A CUGAGCCC | 2095 | GGGCTCAG GGCTAGCTACAACGA TGTGTGGG | 2472 |
| 1469 | ACAACUGA G CCCAUGCU | 1610 | AGCATGGG GGCTAGCTACAACGA TCAGTTGT | 2473 |
| 1473 | CUGAGCCC A UGCUGAUG | 451 | CATCAGCA GGCTAGCTACAACGA GGGCTCAG | 2474 |
| 1475 | GAGCCCAU G CUGAUGGA | 1611 | TCCATCAG GGCTAGCTACAACGA ATGGGCTC | 2475 |
| 1479 | CCAUGCUG A UGGAGUAC | 2096 | GTACTCCA GGCTAGCTACAACGA CAGCATGG | 2476 |
| 1484 | CUGAUGGA G UACCCUGA | 1612 | TCAGGGTA GGCTAGCTACAACGA TCCATCAG | 2477 |
| 1486 | GAUGGAGU A CCCUGAGG | 2097 | CCTCAGGG GGCTAGCTACAACGA ACTCCATC | 2478 |
| 1494 | ACCCUGAG G CUAUAACU | 1613 | AGTTATAG GGCTAGCTACAACGA CTCAGGGT | 2479 |
| 1497 | CUGAGGCU A UAACUCGC | 2098 | GCGAGTTA GGCTAGCTACAACGA AGCCTCAG | 2480 |
| 1500 | AGGCUAUA A CUCGCCUA | 2099 | TAGGCGAG GGCTAGCTACAACGA TATAGCCT | 2481 |
| 1504 | UAUAACUC G CCUAGUGA | 1614 | TCACTAGG GGCTAGCTACAACGA GAGTTATA | 2482 |
| 1509 | CUCGCCUA G UGACAGCC | 1615 | GGCTGTCA GGCTAGCTACAACGA TAGGCGAG | 2483 |
| 1512 | GCCUAGUG A CAGCCCAG | 2100 | CTGGGCTG GGCTAGCTACAACGA CACTAGGC | 2484 |
| 1515 | UAGUGACA G CCCAGAGG | 1616 | CCTCTGGG GGCTAGCTACAACGA TGTCACTA | 2485 |
| 1523 | GCCCAGAG G CCCCCCGA | 1617 | TCGGGGGG GGCTAGCTACAACGA CTCTGGGC | 2486 |
| 1531 | GCCCCCCG A CCCAGCUC | 2101 | GAGCTGGG GGCTAGCTACAACGA CGGGGGGC | 2487 |
| 1536 | CCGACCCA G CUCCUGCU | 1618 | AGCAGGAG GGCTAGCTACAACGA TGGGTCGG | 2488 |
| 1542 | CAGCUCCU G CUCCACUG | 1619 | CAGTGGAG GGCTAGCTACAACGA AGGAGCTG | 2489 |
| 1547 | CCUGCUCC A CUGGGGGC | 477 | GCCCCCAG GGCTAGCTACAACGA GGAGCAGG | 2490 |
| 1554 | CACUGGGG G CCCCGGGG | 1620 | CCCCGGGG GGCTAGCTACAACGA CCCCAGTG | 2491 |
| 1562 | GCCCCCGG G CUCCCCAA | 1621 | TTCGGGAG GGCTAGCTACAACGA CCCGGGGC | 2492 |
| 1570 | CCUCCCCA A UGGCCUCC | 2102 | GGAGGCCA GGCTAGCTACAACGA TGGGGAGC | 2493 |
| 1573 | CCCCAAUG G CCUCCUUU | 1622 | AAAGGAGG GGCTAGCTACAACGA CATTGGGG | 2494 |
| 1588 | UUCAGGAG A UGAAGACU | 2103 | AGTCTTCA GGCTAGCTACAACGA CTCCTGAA | 2495 |
| 1594 | AGAUGAAG A CUUCUCCU | 2104 | AGGAGAAG GGCTAGCTACAACGA CTTCATCT | 2496 |
| 1605 | UCUCCUCC A UUGCGGAC | 497 | GTCCGCAA GGCTAGCTACAACGA GGAGGAGA | 2497 |
| 1608 | CCUCCAUU G CGGACAUG | 1623 | CATGTCCG GGCTAGCTACAACGA AATGGAGG | 2498 |
| 1612 | CAUUGCGG A CAUGGACU | 2105 | AGTCCATG GGCTAGCTACAACGA CCGCAATG | 2499 |
| 1614 | UUGCGGAC A UGGACUUC | 498 | GAAGTCCA GGCTAGCTACAACGA GTCCGCAA | 2500 |
| 1618 | CGACAUGG A CUUCUCAG | 2106 | CTGAGAAG GGCTAGCTACAACGA CCATGTCC | 2501 |
| 1626 | ACUUCUCA G CCCUGCUG | 1624 | CAGCAGGG GGCTAGCTACAACGA TGAGAAGT | 2502 |
| 1631 | UCAGCCCU G CUGAGUCA | 1625 | TGACTCAG GGCTAGCTACAACGA AGGGCTGA | 2503 |
| 1636 | CCUGCUGA G UCAGAUCA | 1626 | TGATCTGA GGCTAGCTACAACGA TCAGCAGG | 2504 |
| 1641 | UGAGUCAG A UCAGCUCC | 2107 | GGAGCTGA GGCTAGCTACAACGA CTGACTCA | 2505 |
| 1645 | UCAGAUCA G CUCCUAAG | 1627 | CTTAGGAG GGCTAGCTACAACGA TGATCTGA | 2506 |
| 1657 | CUAAGGGG G UGACGCCU | 1628 | AGGCGTCA GGCTAGCTACAACGA CCCCTTAG | 2507 |
| 1660 | AGGGGGUG A CGCCUGCC | 2108 | GGCAGGCG GGCTAGCTACAACGA CACCCCCT | 2508 |
| 1662 | GGGGUGAC G CCUGCCCU | 1629 | AGGGCAGG GGCTAGCTACAACGA GTCACCCC | 2509 |
| 1666 | UGACGCCU G CCCUCCCC | 1630 | GGGGAGGG GGCTAGCTACAACGA AGGCGTCA | 2510 |
| 1678 | UCCCCAGA G CACUGGUU | 1631 | AACCAGTG GGCTAGCTACAACGA TCTGGGGA | 2511 |
| 1680 | CCCAGAGC A CUGGUUGC | 520 | GCAACCAG GGCTAGCTACAACGA GCTCTGGG | 2512 |
| 1684 | GAGCACUG G UUGCAGGG | 1632 | CCCTGCAA GGCTAGCTACAACGA CAGTGCTC | 2513 |
| 1687 | CACUGGUU G CAGGGGAU | 1633 | ATCCCCTG GGCTAGCTACAACGA AACCAGTG | 2514 |
| 1694 | UGCAGGGG A UUGAAGCC | 2109 | GGCTTCAA GGCTAGCTACAACGA CCCCTGCA | 2515 |
| 1700 | GGAUUGAA G CCCUCCAA | 1634 | TTGGAGGG GGCTAGCTACAACGA TTCAATCC | 2516 |
| 1711 | CUCCAAAA G CACUUACG | 1635 | CGTAAGTG GGCTAGCTACAACGA TTTTGGAG | 2517 |
| 1713 | CCAAAAGC A CUUACGGA | 528 | TCCGTAAG GGCTAGCTACAACGA GCTTTTGG | 2518 |
| 1717 | AAGCACUU A CGGAUUCU | 2110 | AGAATCCG GGCTAGCTACAACGA AAGTGCTT | 2519 |
| 1721 | ACUUACGG A UUCUGGUG | 2111 | CACCAGAA GGCTAGCTACAACGA CCGTAAGT | 2520 |
| 1727 | GGAUUCUG G UGGGGUGU | 1636 | ACACCCCA GGCTAGCTACAACGA CAGAATCC | 2521 |
| 1732 | CUGGUGGG G UGUGUUCC | 1637 | GGAACACA GGCTAGCTACAACGA CCCACCAG | 2522 |
| 1734 | GGUGGGGU G UGUUCCAA | 1638 | TTGGAACA GGCTAGCTACAACGA ACCCCACC | 2523 |
| 1736 | UGGGGUGU G UUCCAACU | 1639 | AGTTGGAA GGCTAGCTACAACGA ACACCCCA | 2524 |
| 1742 | GUGUUCCA A CUGCCCCC | 2112 | GGGGGCAG GGCTAGCTACAACGA TGGAACAC | 2525 |
| 1745 | UUCCAACU G CCCCCAAC | 1640 | GTTGGGGG GGCTAGCTACAACGA AGTTGGAA | 2526 |
| 1752 | UGCCCCCA A CUUUGUGG | 2113 | CCACAAAG GGCTAGCTACAACGA TGGGGGCA | 2527 |
| 1757 | CCAACUUU G UGGAUGUC | 1641 | GACATCCA GGCTAGCTACAACGA AAAGTTGG | 2528 |
| 1761 | CUUUGUGG A UGUCUUCC | 2114 | GGAAGACA GGCTAGCTACAACGA CCACAAAG | 2529 |
| 1763 | UUGUGGAU G UCUUCCUU | 1642 | AAGGAAGA GGCTAGCTACAACGA ATCCACAA | 2530 |
| 1782 | AGGGGGGA G CCAUAUUU | 1643 | AAATATGG GGCTAGCTACAACGA TCCCCCCT | 2531 |
| 1785 | GGGGAGCC A UAUUUUAU | 544 | ATAAAATA GGCTAGCTACAACGA GGCTCCCC | 2532 |
| 1787 | GGAGCCAU A UUUUAUUC | 2115 | GAATAAAA GGCTAGCTACAACGA ATGGCTCC | 2533 |
| 1792 | CAUAUUUU A UUCUUUUA | 2116 | TAAAAGAA GGCTAGCTACAACGA AAAATATG | 2534 |
| 1800 | AUUCUUUU A UUGUCAGU | 2117 | ACTGACAA GGCTAGCTACAACGA AAAAGAAT | 2535 |
| 1803 | CUUUUAUU G UCAGUAUC | 1644 | GATACTGA GGCTAGCTACAACGA AATAAAAG | 2536 |
| 1807 | UAUUGUCA G UAUCUGUA | 1645 | TACAGATA GGCTAGCTACAACGA TGACAATA | 2537 |
| 1809 | UUGUCAGU A UCUGUAUC | 2118 | GATACAGA GGCTAGCTACAACGA ACTGACAA | 2538 |
| 1813 | CAGUAUCU G UAUCUCUC | 1646 | GAGAGATA GGCTAGCTACAACGA AGATACTG | 2539 |
| 1815 | GUAUCUGU A UCUCUCUC | 2119 | GAGAGAGA GGCTAGCTACAACGA ACAGATAC | 2540 |
| 1835 | UUUUGGAG G UGCUUAAG | 1647 | CTTAAGCA GGCTAGCTACAACGA CTCCAAAA | 2541 |
| 1837 | UUGGAGGU G CUUAAGCA | 1648 | TGCTTAAG GGCTAGCTACAACGA ACCTCCAA | 2542 |
| 1843 | GUGCUUAA G CAGAAGCA | 1649 | TGCTTCTG GGCTAGCTACAACGA TTAAGCAC | 2543 |
| 1849 | AAGCAGAA G CAUUAACU | 1650 | AGTTAATG GGCTAGCTACAACGA TTCTGCTT | 2544 |
| 1851 | GCAGAAGC A UUAACUUC | 555 | GAAGTTAA GGCTAGCTACAACGA GCTTCTGC | 2545 |
| 1855 | AAGCAUUA A CUUCUCUG | 2120 | CAGAGAAG GGCTAGCTACAACGA TAATGCTT | 2546 |
| 1875 | AGGGGGGA G CUGGGGAA | 1651 | TTCCCCAG GGCTAGCTACAACGA TCCCCCCT | 2547 |
| 1884 | CUGGGGAA A CUCAAACU | 2121 | AGTTTGAG GGCTAGCTACAACGA TTCCCCAG | 2548 |
| 1890 | AAACUCAA A CUUUUCCC | 2122 | GGGAAAAG GGCTAGCTACAACGA TTGAGTTT | 2549 |
| 1901 | UUUCCCCU G UCCUGAUG | 1652 | CATCAGGA GGCTAGCTACAACGA AGGGGAAA | 2550 |
| 1907 | CUGUCCUG A UGGUCAGC | 2123 | GCTGACCA GGCTAGCTACAACGA CAGGACAG | 2551 |
| 1910 | UCCUGAUG G UCAGCUCC | 1653 | GGAGCTGA GGCTAGCTACAACGA CATCAGGA | 2552 |
| 1914 | GAUGGUCA G CUCCCUUC | 1654 | GAAGGGAG GGCTAGCTACAACGA TGACCATC | 2553 |
| 1926 | CCUUCUCU G UAGGGAAC | 1655 | GTTCCCTA GGCTAGCTACAACGA AGAGAAGG | 2554 |
| 1933 | UGUAGGGA A CUGUGGGG | 2124 | CCCCACAG GGCTAGCTACAACGA TCCCTACA | 2555 |
| 1936 | AGGGAACU G UGGGGUCC | 1656 | GGACCCCA GGCTAGCTACAACGA AGTTCCCT | 2556 |
| 1941 | ACUGUGGG G UCCCCCAU | 1657 | ATGGGGGA GGCTAGCTACAACGA CCCACAGT | 2557 |
| 1948 | GGUCCCCC A UCCCCAUC | 581 | GATGGGGA GGCTAGCTACAACGA GGGGGACC | 2558 |
| 1954 | CCAUCCCC A UCCUCCAG | 585 | CTGGAGGA GGCTAGCTACAACGA GGGGATGG | 2559 |
| 1962 | AUCCUCCA G CUUCUGGU | 1658 | ACCAGAAG GGCTAGCTACAACGA TGGAGGAT | 2560 |
| 1969 | AGCUUCUG G UACUCUCC | 1659 | GGAGAGTA GGCTAGCTACAACGA CAGAAGCT | 2561 |
| 1971 | CUUCUGGU A CUCUCCUA | 2125 | TAGGAGAG GGCTAGCTACAACGA ACCAGAAG | 2562 |
| 1983 | UCCUAGAG A CAGAAGCA | 2126 | TGCTTCTG GGCTAGCTACAACGA CTCTAGGA | 2563 |
| 1989 | AGACAGAA G CAGGCUGG | 1660 | CCAGCCTG GGCTAGCTACAACGA TTCTGTCT | 2564 |
| 1993 | AGAAGCAG G CUGGAGGU | 1661 | ACCTCCAG GGCTAGCTACAACGA CTGCTTCT | 2565 |
| 2000 | GGCUGGAG G UAAGGCCU | 1662 | AGGCCTTA GGCTAGCTACAACGA CTCCAGCC | 2566 |
| 2005 | GAGGUAAG G CCUUUGAG | 1663 | CTCAAAGG GGCTAGCTACAACGA CTTACCTC | 2567 |
| 2013 | GCCUUUGA G CCCACAAA | 1664 | TTTGTGGG GGCTAGCTACAACGA TCAAAGGC | 2568 |
| 2017 | UUGAGCCC A CAAAGCCU | 603 | AGGCTTTG GGCTAGCTACAACGA GGGCTCAA | 2569 |
| 2022 | CCCACAAA G CCUUAUCA | 1665 | TGATAAGG GGCTAGCTACAACGA TTTGTGGG | 2570 |
| 2027 | AAAGCCUU A UCAAGUGU | 2127 | ACACTTGA GGCTAGCTACAACGA AAGGCTTT | 2571 |
| 2032 | CUUAUCAA G UGUCUUCC | 1666 | GGAAGACA GGCTAGCTACAACGA TTGATAAG | 2572 |
| 2034 | UAUCAAGU G UCUUCCAU | 1667 | ATGGAAGA GGCTAGCTACAACGA ACTTGATA | 2573 |
| 2041 | UGUCUUCC A UCAUGGAU | 610 | ATCCATGA GGCTAGCTACAACGA GGAAGACA | 2574 |
| 2044 | CUUCCAUC A UGGAUUCA | 611 | TGAATCCA GGCTAGCTACAACGA GATGGAAG | 2575 |
| 2048 | CAUCAUGG A UUCAUUAC | 2128 | GTAATGAA GGCTAGCTACAACGA CCATGATG | 2576 |
| 2052 | AUGGAUUC A UUACAGCU | 612 | AGCTGTAA GGCTAGCTACAACGA GAATCCAT | 2577 |
| 2055 | GAUUCAUU A CAGCUUAA | 2129 | TTAAGCTG GGCTAGCTACAACGA AATGAATC | 2578 |
| 2058 | UCAUUACA G CUUAAUCA | 1668 | TGATTAAG GGCTAGCTACAACGA TGTAATGA | 2579 |
| 2063 | ACAGCUUA A UCAAAAUA | 2130 | TATTTTGA GGCTAGCTACAACGA TAAGCTGT | 2580 |
| 2069 | UAAUCAAA A UAACGCCC | 2131 | GGGCGTTA GGCTAGCTACAACGA TTTGATTA | 2581 |
| 2072 | UCAAAAUA A CGCCCCAG | 2132 | CTGGGGCG GGCTAGCTACAACGA TATTTTGA | 2582 |
| 2074 | AAAAUAAC G CCCCAGAU | 1669 | ATCTGGGG GGCTAGCTACAACGA GTTATTTT | 2583 |
| 2081 | CGCCCCAG A UACCAGCC | 2133 | GGCTGGTA GGCTAGCTACAACGA CTGGGGCG | 2584 |
| 2083 | CCCCAGAU A CCAGCCCC | 2134 | GGGGCTGG GGCTAGCTACAACGA ATCTGGGG | 2585 |
| 2087 | AGAUACCA G CCCCUGUA | 1670 | TACAGGGG GGCTAGCTACAACGA TGGTATCT | 2586 |
| 2093 | CAGCCCCU G UAUGGCAC | 1671 | GTGCCATA GGCTAGCTACAACGA AGGGGCTG | 2587 |
| 2095 | GCCCCUGU A UGGCACUG | 2135 | CAGTGCCA GGCTAGCTACAACGA ACAGGGGC | 2588 |
| 2098 | CCUGUAUG G CACUGGCA | 1672 | TGCCAGTG GGCTAGCTACAACGA CATACAGG | 2589 |
| 2100 | UGUAUGGC A CUGGCAUU | 626 | AATGCCAG GGCTAGCTACAACGA GCCATACA | 2590 |
| 2104 | UGGCACUG G CAUUGUCC | 1673 | GGACAATG GGCTAGCTACAACGA CAGTGCCA | 2591 |
| 2106 | GCACUGGC A UUGUCCCU | 628 | AGGGACAA GGCTAGCTACAACGA GCCAGTGC | 2592 |
| 2109 | CUGGCAUU G UCCCUGUG | 1674 | CACAGGGA GGCTAGCTACAACGA AATGCCAG | 2593 |
| 2115 | UUGUCCCU G UGCCUAAC | 1675 | GTTAGGCA GGCTAGCTACAACGA AGGGACAA | 2594 |
| 2117 | GUCCCUGU G CCUAACAC | 1676 | GTGTTAGG GGCTAGCTACAACGA ACAGGGAC | 2595 |
| 2122 | UGUGCCUA A CACCAGCG | 2136 | CGCTGGTG GGCTAGCTACAACGA TAGGCACA | 2596 |
| 2124 | UGCCUAAC A CCAGCGUU | 634 | AACGCTGG GGCTAGCTACAACGA GTTAGGCA | 2597 |
| 2128 | UAACACCA G CGUUUGAG | 1677 | CTCAAACG GGCTAGCTACAACGA TGGTGTTA | 2598 |
| 2130 | ACACCAGC G UUUGAGGG | 1678 | CCCTCAAA GGCTAGCTACAACGA GCTGGTGT | 2599 |
| 2139 | UUUGAGGG G CUGCCUUC | 1679 | GAAGGCAG GGCTAGCTACAACGA CCCTCAAA | 2600 |
| 2142 | GAGGGGCU G CCUUCCUG | 1680 | CAGGAAGG GGCTAGCTACAACGA AGCCCCTC | 2601 |
| 2150 | GCCUUCCU G CCCUACAG | 1681 | CTGTAGGG GGCTAGCTACAACGA AGGAAGGC | 2602 |
| 2155 | CCUGCCCU A CAGAGGUC | 2137 | GACCTCTG GGCTAGCTACAACGA AGGGCAGG | 2603 |
| 2161 | CUACAGAG G UCUCUGCC | 1682 | GGCAGAGA GGCTAGCTACAACGA CTCTGTAG | 2604 |
| 2167 | AGGUCUCU G CCGGCUCU | 1683 | AGAGCCGG GGCTAGCTACAACGA AGAGACCT | 2605 |
| 2171 | CUCUGCCG G CUCUUUCC | 1684 | GGAAAGAG GGCTAGCTACAACGA CGGCAGAG | 2606 |
| 2182 | CUUUCCUU G CUCAACCA | 1685 | TGGTTGAG GGCTAGCTACAACGA AAGGAAAG | 2607 |
| 2187 | CUUGCUCA A CCAUGGCU | 2138 | AGCCATGG GGCTAGCTACAACGA TGAGCAAG | 2608 |
| 2190 | GCUCAACC A UGGCUGAA | 656 | TTCAGCCA GGCTAGCTACAACGA GGTTGAGC | 2609 |
| 2193 | CAACCAUG G CUGAAGGA | 1686 | TCCTTCAG GGCTAGCTACAACGA CATGGTTG | 2610 |
| 2203 | UGAAGGAA A CAGUGCAA | 2139 | TTGCACTG GGCTAGCTACAACGA TTCCTTCA | 2611 |
| 2206 | AGGAAACA G UGCAACAG | 1687 | CTGTTGCA GGCTAGCTACAACGA TGTTTCCT | 2612 |
| 2208 | GAAACAGU G CAACAGCA | 1688 | TGCTGTTG GGCTAGCTACAACGA ACTGTTTC | 2613 |
| 2211 | ACAGUGCA A CAGCACUG | 2140 | CAGTGCTG GGCTAGCTACAACGA TGCACTGT | 2614 |
| 2214 | GUGCAACA G CACUGGCU | 1689 | AGCCAGTG GGCTAGCTACAACGA TGTTGCAC | 2615 |
| 2216 | GCAACAGC A CUGGCUCU | 661 | AGAGCCAG GGCTAGCTACAACGA GCTGTTGC | 2616 |
| 2220 | CAGCACUG G CUCUCUCC | 1690 | GGAGAGAG GGCTAGCTACAACGA CAGTGCTG | 2617 |
| 2232 | UCUCCAGG A UCCAGAAG | 2141 | CTTCTGGA GGCTAGCTACAACGA CCTGGAGA | 2618 |
| 2243 | CAGAAGGG G UUUGGUCU | 1691 | AGACCAAA GGCTAGCTACAACGA CCCTTCTG | 2619 |
| 2248 | GGGGUUUG G UCUGGACU | 1692 | AGTCCAGA GGCTAGCTACAACGA CAAACCCC | 2620 |
| 2254 | UGGUCUGG A CUUCCUUG | 2142 | CAAGGAAG GGCTAGCTACAACGA CCAGACCA | 2621 |
| 2262 | ACUUCCUU G CUCUCCCC | 1693 | GUGGAGAG GGCTAGCTACAACGA AAGGAAGT | 2622 |
| 2280 | CUUCUCAA G UGCCUUAA | 1694 | TTAAGGCA GGCTAGCTACAACGA TTGAGAAG | 2623 |
| 2282 | UCUCAAGU G CCUUAAUA | 1695 | TATTAAGG GGCTAGCTACAACGA ACTTGAGA | 2624 |
| 2288 | GUGCCUUA A UAGUAGGG | 2143 | CCCTACTA GGCTAGCTACAACGA TAAGGCAC | 2625 |
| 2291 | CCUUAAUA G UAGGGUAA | 1696 | TTACCCTA GGCTAGCTACAACGA TATTAAGG | 2626 |
| 2296 | AUAGUAGG G UAAGUUGU | 1697 | ACAACTTA GGCTAGCTACAACGA CCTACTAT | 2627 |
| 2300 | UAGGGUAA G UUGUUAAG | 1698 | CTTAACAA GGCTAGCTACAACGA TTACCCTA | 2628 |
| 2303 | GGUAAGUU G UUAAGAGU | 1699 | ACTCTTAA GGCTAGCTACAACGA AACTTACC | 2629 |
| 2310 | UGUUAAGA G UGGGGGAG | 1700 | CTCCCCCA GGCTAGCTACAACGA TCTTAACA | 2630 |
| 2320 | GGGGGAGA G CAGGCUGG | 1701 | CCAGCCTG GGCTAGCTACAACGA TCTCCCCC | 2631 |
| 2324 | GAGAGCAG G CUGGCAGC | 1702 | GCTGCCAG GGCTAGCTACAACGA CTGCTCTC | 2632 |
| 2328 | GCAGGCUG G CAGCUCUC | 1703 | GAGAGCTG GGCTAGCTACAACGA CAGCCTGC | 2633 |
| 2331 | GGCUGGCA G CUCUCCAG | 1704 | CTGGAGAG GGCTAGCTACAACGA TGCCAGCC | 2634 |
| 2339 | GCUCUCCA G UCAGGAGG | 1705 | CCTCCTGA GGCTAGCTACAACGA TGGAGAGC | 2635 |
| 2347 | GUCAGGAG G CAUAGUUU | 1706 | AAACTATG GGCTAGCTACAACGA CTCCTGAC | 2636 |
| 2349 | CAGGAGGC A UAGUUUUU | 693 | AAAAACTA GGCTAGCTACAACGA GCCTCCTG | 2637 |
| 2352 | GAGGCAUA G UUUUUAGU | 1707 | ACTAAAAA GGCTAGCTACAACGA TATGCCTC | 2638 |
| 2359 | AGUUUUUA G UGAACAAU | 1708 | ATTGTTCA GGCTAGCTACAACGA TAAAAACT | 2639 |
| 2363 | UUUAGUGA A CAAUCAAA | 2144 | TTTGATTG GGCTAGCTACAACGA TCACTAAA | 2640 |
| 2366 | AGUGAACA A UCAAAGCA | 2145 | TGCTTTGA GGCTAGCTACAACGA TGTTCACT | 2641 |
| 2372 | CAAUCAAA G CACUUGGA | 1709 | TCCAAGTG GGCTAGCTACAACGA TTTGATTG | 2642 |
| 2374 | AUCAAAGC A CUUGGACU | 696 | AGTCCAAG GGCTAGCTACAACGA GCTTTGAT | 2643 |
| 2380 | GCACUUGG A CUCUUGCU | 2146 | AGCAAGAG GGCTAGCTACAACGA CCAAGTGC | 2644 |
| 2386 | GGACUCUU G CUCUUUCU | 1710 | AGAAAGAG GGCTAGCTACAACGA AAGAGTCC | 2645 |
| 2395 | CUCUUUCU A CUCUGAAC | 2147 | GTTCAGAG GGCTAGCTACAACGA AGAAAGAC | 2646 |
| 2402 | UACUCUGA A CUAAUAAA | 2148 | TTTATTAG GGCTAGCTACAACGA TCAGAGTA | 2647 |
| 2406 | CUGAACUA A UAAAGCUG | 2149 | CAGCTTTA GGCTAGCTACAACGA TAGTTCAG | 2648 |
| 2411 | CUAAUAAA G CUGUUGCC | 1711 | GGCAACAG GGCTAGCTACAACGA TTTATTAG | 2649 |
| 2414 | AUAAAGCU G UUGCCAAG | 1712 | CTTGGCAA GGCTAGCTACAACGA AGCTTTAT | 2650 |
| 2417 | AAGCUGUU G CCAAGCUG | 1713 | CAGCTTGG GGCTAGCTACAACGA AACAGCTT | 2651 |
| 2422 | GUUGCCAA G CUGGACGG | 1714 | CCGTCCAG GGCTAGCTACAACGA TTGGCAAC | 2652 |
| 2427 | CAAGCUGG A CGGCACGA | 2150 | TCGTGCCG GGCTAGCTACAACGA CCAGCTTG | 2653 |
| 2430 | GCUGGACG G CACGAGCU | 1715 | AGCTCGTG GGCTAGCTACAACGA CGTCCAGC | 2654 |
| 2432 | UGGACGGC A CGAGCUCG | 710 | CGAGCTCG GGCTAGCTACAACGA GCCGTCCA | 2655 |
| 2436 | CGGCACGA G CUCGUGCC | 1716 | GGCACGAG GGCTAGCTACAACGA TCGTGCCG | 2656 |

Input Sequence = NM_021975. Cut Site = R/Y Arm Length = 8. Core Sequence = GGCTAGCTACAACGA NM_021975 (Homo sapiens p65 RelA (NFKB), mRNA; 2444 bp)

[0261] TABLE VI
Human REL-A Amberzyme and Substrate Sequence

| | | Seq | | Seq |
|---|---|---|---|---|
| Pos | Substrate | ID | Amberzyme | ID |
| 9 | GGCACGAG G CGGGGCCG | 1421 | CGGCCCCG GGAGGAAACUCC CU UCAAGGACAUCGUCCGGG CUCGUGCC | 2994 |
| 11 | CACGAGGC G GGGCCGGG | 2657 | CCCGGCCC GGAGGAAACUCC CU UCAAGGACAUCGUCCGGG GCCUCGUG | 2995 |
| 12 | ACGAGGCG G GGCCGGGU | 2658 | ACCCGGCC GGAGGAAACUCC CU UCAAGGACAUCGUCCGGG CGCCUCGU | 2996 |
| 13 | CGAGGCGG G GCCGGGUC | 2659 | GACCCGGC GGAGGAAACUCC CU UCAAGGACAUCGUCCGGG CCGCCUCG | 2997 |
| 14 | GAGGCGGG G CCGGGUCG | 1422 | CGACCCGG GGAGGAAACUCC CU UCAAGGACAUCGUCCGGG CCCGCCUC | 2998 |
| 17 | GCGGGGCC G GGUCGCAG | 2660 | CUGCGACC GGAGGAAACUCC CU UCAAGGACAUCGUCCGGG GGCCCCGC | 2999 |
| 18 | CGGGGCCG G GUCGCAGC | 2661 | GCUGCGAC GGAGGAAACUCC CU UCAAGGACAUCGUCCGGG CGGCCCCG | 3000 |
| 19 | GGGGCCGG G UCGCAGCU | 1423 | AGCUGCGA GGAGGAAACUCC CU UCAAGGACAUCGUCCGGG CCGGCCCC | 3001 |
| 22 | GCCGGGUC G CAGCUGGG | 1424 | CCCAGCUG GGAGGAAACUCC CU UCAAGGACAUCGUCCGGG GACCCGGC | 3002 |
| 25 | GGGUCGCA G CUGGGCCC | 1425 | GGGCCCAG GGAGGAAACUCC CU UCAAGGACAUCGUCCGGG UGCGACCC | 3003 |
| 28 | UCGCAGCU G GGCCCGCG | 2662 | CGCGGGCC GGAGGAAACUCC CU UCAAGGACAUCGUCCGGG AGCUGCGA | 3004 |
| 29 | CGCAGCUG G GCCCGCGG | 2663 | CCGCGGGC GGAGGAAACUCC CU UCAAGGACAUCGUCCGGG CAGCUGCG | 3005 |
| 30 | GCAGCUGG G CCCGCGGC | 1426 | GCCGCGGG GGAGGAAACUCC CU UCAAGGACAUCGUCCGGG CCAGCUGC | 3006 |
| 34 | CUGGGCCC G CGGCAUGG | 1427 | CCAUGCCG GGAGGAAACUCC CU UCAAGGACAUCGUCCGGG GGGCCCAG | 3007 |
| 36 | GGGCCCGC G GCAUGGAC | 2664 | GUCCAUGC GGAGGAAACUCC CU UCAAGGACAUCGUCCGGG GCGGGCCC | 3008 |
| 37 | GGCCCGCG G CAUGGACG | 1428 | CGUCCAUG GGAGGAAACUCC CU UCAAGGACAUCGUCCGGG CGCGGGCC | 3009 |
| 41 | CGCGGCAU G GACGAACU | 2665 | AGUUCGUC GGAGGAAACUCC CU UCAAGGACAUCGUCCGGG AUGCCGCG | 3010 |
| 42 | GCGGCAUG G ACGAACUG | 2666 | CAGUUCGU GGAGGAAACUCC CU UCAAGGACAUCGUCCGGG CAUGCCGC | 3011 |
| 45 | GCAUCGAC G AACUGUUC | 2667 | GAACAGUU GGAGGAAACUCC CU UCAAGGACAUCGUCCGGG CUCCAUGC | 3012 |
| 50 | GACGAACU G UUCCCCCU | 1429 | AGGGGGAA GGAGGAAACUCC CU UCAAGGACAUCGUCCGGG AGUUCGUC | 3013 |
| 68 | AUCUUCCC G GCAGAGCA | 2668 | UGCUCUGC GGAGGAAACUCC CU UCAAGGACAUCGUCCGGG GGGAAGAU | 3014 |
| 69 | UCUUCCCG G CAGAGCAG | 1430 | CUGCUCUG GGAGGAAACUCC CU UCAAGGACAUCGUCCGGG CGGGAAGA | 3015 |
| 72 | UCCCCGCA G AGCAGCCC | 2669 | GGGCUGCU GGAGGAAACUCC CU UCAAGGACAUCGUCCGGG UGCCGCGA | 3016 |
| 74 | CCGGCAGA G CAGCCCAA | 1431 | UUGGGCUG GGAGGAAACUCC CU UCAAGGACAUCGUCCGGG UCUGCCGG | 3017 |
| 77 | GCAGACCA G CCCAAGCA | 1432 | UGCUUGGG GGAGGAAACUCC CU UCAAGGACAUCGUCCGGG UGCUCUGC | 3018 |
| 83 | CAGCCCAA G CAGCGGGG | 1433 | CCCCGCUG GGAGGAAACUCC CU UCAAGGACAUCGUCCGGG UUGGGCUG | 3019 |
| 86 | CCCAAGCA G CGGGGCAU | 1434 | AUGCCCCG GGAGGAAACUCC CU UCAAGGACAUCGUCCGGG UGCUUGGG | 3020 |
| 88 | CAAGCAGC G GGGCAUGC | 2670 | GCAUGCCC GGAGGAAACUCC CU UCAAGGACAUCGUCCGGG GCUGCUUG | 3021 |
| 89 | AAGCAGCG G GGCAUGCG | 2671 | CGCAUGCC GGAGGAAACUCC CU UCAAGGACAUCGUCCGGG CGCUGCUU | 3022 |
| 90 | AGCAGCGG G GCAUGCGC | 2672 | GCGCAUGC GGAGGAAACUCC CU UCAAGGACAUCGUCCGGG CCGCUGCU | 3023 |
| 91 | GCAGCGGG G CAUGCGCU | 1435 | AGCGCAUG GGAGGAAACUCC CU UCAAGGACAUCGUCCGGG CCCGCUGC | 3024 |
| 95 | CGGGGCAU G CGCUUCCG | 1436 | CGGAAGCG GGAGGAAACUCC CU UCAAGGACAUCGUCCGGG AUGCCCCG | 3025 |
| 97 | GGGCAUGC G CUUCCGCU | 1437 | GCAUGCCC GGAGGAAACUCC CU UCAAGGACAUCGUCCGGG GCAUGCCC | 3026 |
| 103 | GCGCUUCC G CUACAAGU | 1438 | GGAAGCGC GGAGGAAACUCC CU UCAAGGACAUCGUCCGGG GGAAGCGC | 3027 |
| 110 | CGCUACAA G UGCGAGGG | 1439 | UUGUAGCG GGAGGAAACUCC CU UCAAGGACAUCGUCCGGG UUGUAGCG | 3028 |
| 112 | CUACAAGU G CGAGGGGC | 1440 | ACUUGUAG GGAGGAAACUCC CU UCAAGGACAUCGUCCGGG ACUUGUAG | 3029 |
| 114 | ACAAGUGC G AGGGGCGC | 2673 | GCACUUGU GGAGGAAACUCC CU UCAAGGACAUCGUCCGGG GCACUUGU | 3030 |
| 116 | AAGUGCGA G GGGCGCUC | 2674 | UCGCACUU GGAGGAAACUCC CU UCAAGGACAUCGUCCGGG UCGCACUU | 3031 |
| 117 | AGUGCGAG G GGCGCUCC | 2675 | CUCGCACU GGAGGAAACUCC CU UCAAGGACAUCGUCCGGG CUCGCACU | 3032 |
| 118 | GUGCGAGG G GCGCUCCG | 2676 | CCUCGCAC GGAGGAAACUCC CU UCAAGGACAUCGUCCGGG CCUCGCAC | 3033 |
| 119 | UGCGAGGG G CGCUCCGC | 1441 | CCCUCGCA GGAGGAAACUCC CU UCAAGGACAUCGUCCGGG CCCUCGCA | 3034 |
| 121 | CGAGGGGC G CUCCGCGG | 1442 | GCCCCUCG GGAGGAAACUCC CU UCAAGGACAUCGUCCGGG GCCCCUCG | 3035 |
| 126 | GGCGCUCC G CGGGCAGC | 1443 | GGAGCGCC GGAGGAAACUCC CU UCAAGGACAUCGUCCGGG GGAGCGCC | 3036 |
| 128 | CGCUCCGC G GGCAGCAU | 2677 | GCGGAGCG GGAGGAAACUCC CU UCAAGGACAUCGUCCGGG GCGGAGCG | 3037 |
| 129 | GCUCCGCG G GCAGCAUC | 2678 | CGCGCAGC GGAGGAAACUCC CU UCAAGGACAUCGUCCGGG CGCGGAGC | 3038 |
| 130 | CUCCGCGG G CAGCAUCC | 1444 | GGAUGCUG GGAGGAAACUCC CU UCAAGGACAUCGUCCGGG CCGCGGAG | 3039 |
| 133 | CGCGGGCA G CAUCCCAG | 1445 | CUGGGAUG GGAGGAAACUCC CU UCAAGGACAUCGUCCGGG UGCCCGCG | 3040 |
| 141 | GCAUCCCA G GCGAGAGG | 2679 | CCUCUCGC GGAGGAAACUCC CU UCAAGGACAUCGUCCGGG UGGGAUGC | 3041 |
| 142 | CAUCCCAG G CGAGAGGA | 1446 | UCCUCUCG GGAGGAAACUCC CU UCAAGGACAUCGUCCGGG CUGGGAUG | 3042 |
| 144 | UCCCAGGC G AGAGGAGC | 2680 | GCUCCUCU GGAGGAAACUCC CU UCAAGGACAUCGUCCGGG GCCUGGGA | 3043 |
| 146 | CCAGGCGA G AGGAGCAC | 2681 | GUGCUCCU GGAGGAAACUCC CU UCAAGGACAUCGUCCGGG UCGCCUGG | 3044 |
| 148 | AGGCGAGA G GAGCACAG | 2682 | CUGUGCUC GGAGGAAACUCC CU UCAAGGACAUCGUCCGGG UCUCGCCU | 3045 |
| 149 | GGCGAGAG G AGCACAGA | 2683 | UCUGUGCU GGAGGAAACUCC CU UCAAGGACAUCGUCCGGG CUCUCGCC | 3046 |
| 151 | CGAGAGGA G CACAGAUA | 1447 | UAUCUGUG GGAGGAAACUCC CU UCAAGGACAUCGUCCGGG UCCUCUCG | 3047 |
| 156 | GGAGCACA G AUACCACC | 2684 | GGUGGUAU GGAGGAAACUCC CU UCAAGGACAUCGUCCGGG UGUGCUCC | 3048 |
| 167 | ACCACCAA G ACCCACCC | 2685 | GGGUGGGU GGAGGAAACUCC CU UCAAGGACAUCGUCCGGG UUGGUGGU | 3049 |
| 185 | ACCAUCAA G AUCAAUGG | 2686 | CCAUUGAU GGAGGAAACUCC CU UCAAGGACAUCGUCCGGG UUGAUGGU | 3050 |
| 192 | AGAUCAAU G GCUACACA | 2687 | UGUGUAGC GGAGGAAACUCC CU UCAAGGACAUCGUCCGGG AUUGAUCU | 3051 |
| 193 | GAUCAAUG G CUACACAG | 1448 | CUGUGUAG GGAGGAAACUCC CU UCAAGGACAUCGUCCGGG CAUUGAUC | 3052 |
| 201 | GCUACACA G GACCAGGG | 2688 | CCCUGGUC GGAGGAAACUCC CU UCAAGGACAUCGUCCGGG UGUGUAGC | 3053 |
| 202 | CUACACAG G ACCAGGGA | 2689 | UCCCUGGU GGAGGAAACUCC CU UCAAGGACAUCGUCCGGG CUGUGUAG | 3054 |
| 207 | CAGGACCA G GGACAGUG | 2690 | CACUGUCC GGAGGAAACUCC CU UCAAGGACAUCGUCCGGG UGGUCCUG | 3055 |
| 208 | AGGACCAG G GACAGUGC | 2691 | GCACUGUC GGAGGAAACUCC CU UCAAGGACAUCGUCCGGG CUGGUCCU | 3056 |
| 209 | GGACCAGG G ACAGUGCG | 2692 | CGCACUGU GGAGGAAACUCC CU UCAAGGACAUCGUCCGGG CCUGGUCC | 3057 |
| 213 | CAGGGACA G UGCGCAUC | 1449 | GAUGCGCA GGAGGAAACUCC CU UCAAGGACAUCGUCCGGG UGUCCCUG | 3058 |
| 215 | GGGACAGU G GGCAUCUC | 1450 | GAGAUGCG GGAGGAAACUCC CU UCAAGGACAUCGUCCGGG ACUGUCCC | 3059 |
| 217 | GACAGUGC G CAUCUCCC | 1451 | GGGAGAUG GGAGGAAACUCC CU UCAAGGACAUCGUCCGGG GCACUGUC | 3060 |
| 227 | AUCUCCCU G CUCACCAA | 2693 | UUGGUGAC GGAGGAAACUCC CU UCAAGGACAUCGUCCGGG AGGGAGAU | 3061 |
| 228 | UCUCCCUG G UCACCAAG | 1452 | CUUGGUGA GGAGGAAACUCC CU UCAAGGACAUCGUCCGGG CAGGGAGA | 3062 |
| 236 | GUCACCAA G GACCCUCC | 2694 | GGAGGGUC GGAGGAAACUCC CU UCAAGGACAUCGUCCGGG UUGGUGAC | 3063 |
| 237 | UCACCAAG G ACCCUCCU | 2695 | AGGAGGGU GGAGGAAACUCC CU UCAAGGACAUCGUCCGGG CUUGGUGA | 3064 |
| 250 | UCCUCACC G GCCUCACC | 2696 | GGUCAGGC GGAGGAAACUCC CU UCAAGGACAUCGUCCGGG GGUGAGGA | 3065 |
| 251 | CCUCACCG G CCUCACCC | 1453 | GGGUGAGG GGAGGAAACUCC CU UCAAGGACAUCGUCCGGG CGGUGAGG | 3066 |
| 264 | ACCCCCAC G AGCUUGUA | 2697 | UACAAGCU GGAGGAAACUCC CU UCAAGGACAUCGUCCGGG GUGGGGGU | 3067 |
| 266 | CCCCACGA G CUUGUAGG | 1454 | CCUACAAG GGAGGAAACUCC CU UCAAGGACAUCGUCCGGG UCGUGGGG | 3068 |
| 270 | ACGAGCUU G UAGGAAAG | 1455 | CUUUCCUA GGAGGAAACUCC CU UCAAGGACAUCGUCCGGG AAGCUCGU | 3069 |
| 273 | AGCUUGUA G GAAAGGAC | 2698 | GUCCUUUC GGAGGAAACUCC CU UCAAGGACAUCGUCCGGG UACAAGCU | 3070 |
| 274 | GCUUGUAG G AAAGGACU | 2699 | AGUCCUUU GGAGGAAACUCC CU UCAAGGACAUCGUCCGGG CUACAAGC | 3071 |
| 278 | GUAGGAAA G GACUGCCG | 2700 | CGGCAGUC GGAGGAAACUCC CU UCAAGGACAUCGUCCGGG UUUCCUAC | 3072 |
| 279 | UAGGAAAG G ACUGCCGG | 2701 | CCGGCAGU GGAGGAAACUCC CU UCAAGGACAUCGUCCGGG CUUUCCUA | 3073 |
| 283 | AAAGGACU G CCGGGAUG | 1456 | CAUCCCGG GGAGGAAACUCC CU UCAAGGACAUCGUCCGGG AGUCCUUU | 3074 |
| 286 | GGACUGCC G GGAUGGCU | 2702 | AGCCAUCC GGAGGAAACUCC CU UCAAGGACAUCGUCCGGG GGCAGUCC | 3075 |
| 287 | GACUGCCG G GAUGGCUU | 2703 | AAGCCAUC GGAGGAAACUCC CU UCAAGGACAUCGUCCGGG CGGCAGUC | 3076 |
| 288 | ACUGCCGG G AUGGCUUC | 2704 | GAAGCCAU GGAGGAAACUCC CU UCAAGGACAUCGUCCGGG CCGGCAGU | 3077 |
| 291 | GCCGGGAU G GCUUCUAU | 2705 | AUAGAAGC GGAGGAAACUCC CU UCAAGGACAUCGUCCGGG AUCCCGGC | 3078 |
| 292 | CCGGGAUG G CUUCUAUG | 1457 | CAUAGAAG GGAGGAAACUCC CU UCAAGGACAUCGUCCGGG CAUCCCGG | 3079 |
| 300 | GCUUCUAU G AGGCUGAG | 2706 | CUCAGCCU GGAGGAAACUCC CU UCAAGGACAUCGUCCGGG AUAGAAGC | 3080 |
| 302 | UUCUAUGA G GCUGAGCU | 2707 | AGCUCAGC GGAGGAAACUCC CU UCAAGGACAUCGUCCGGG UCAUAGAA | 3081 |
| 303 | UCUAUGAG G CUGAGCUC | 1458 | GAGCUCAG GGAGGAAACUCC CU UCAAGGACAUCGUCCGGG CUCAUAGA | 3082 |
| 306 | AUGAGGCU G AGCUCUGC | 2708 | GCAGAGCU GGAGGAAACUCC CU UCAAGGACAUCGUCCGGG AGCCUCAU | 3083 |
| 308 | GAGGCUGA G CUCUGCCC | 1459 | GGGCAGAG GGAGGAAACUCC CU UCAAGGACAUCGUCCGGG UCAGCCUC | 3084 |
| 313 | UGAGCUCU G CCCGGACC | 1460 | GGUCCGGG GGAGGAAACUCC CU UCAAGGACAUCGUCCGGG AGAGCUCA | 3085 |
| 317 | CUCUGCCC G GACCGCUG | 2709 | CAGCGGUC GGAGGAAACUCC CU UCAAGGACAUCGUCCGGG GGGCAGAG | 3086 |
| 318 | UCUGCCCG G ACCGCUGC | 2710 | GCAGCGGU GGAGGAAACUCC CU UCAAGGACAUCGUCCGGG CGGGCAGA | 3087 |
| 322 | CCCGGACC G CUGCAUCC | 1461 | GGAUGCAG GGAGGAAACUCC CU UCAAGGACAUCGUCCGGG GGUCCGGG | 3088 |
| 325 | GGACCGCU G CAUCCACA | 1462 | UGUGGAUG GGAGGAAACUCC CU UCAAGGACAUCGUCCGGG AGCGGUCC | 3089 |
| 334 | CAUCCACA G UUUCCAGA | 1463 | UCUGGAAA GGAGGAAACUCC CU UCAAGGACAUCGUCCGGG UGUGGAUG | 3090 |
| 341 | AGUUUCCA G AACCUGGG | 2711 | CCCAGGUU GGAGGAAACUCC CU UCAAGGACAUCGUCCGGG UGGAAACU | 3091 |
| 347 | CAGAACCU G GGAAUCCA | 2712 | UGGAUUCC GGAGGAAACUCC CU UCAAGGACAUCGUCCGGG AGGUUCUG | 3092 |
| 348 | AGAACCUG G GAAUCCAG | 2713 | CUGGAUUC GGAGGAAACUCC CU UCAAGGACAUCGUCCGGG CAGGUUCU | 3093 |
| 349 | GAACCUGG G AAUCCAGU | 2714 | ACUGGAUU GGAGGAAACUCC CU UCAAGGACAUCGUCCGGG CCAGGUUC | 3094 |
| 356 | GGAAUCCA G UGUGUGAA | 1464 | UUCACACA GGAGGAAACUCC CU UCAAGGACAUCGUCCGGG UGGAUUCC | 3095 |
| 358 | AAUCCAGU G UGUGAAGA | 1465 | UCUUCACA GGAGGAAACUCC CU UCAAGGACAUCGUCCGGG ACUGGAUU | 3096 |
| 360 | UCCAGUGU G UGAAGAAG | 1466 | CUUCUUCA GGAGGAAACUCC CU UCAAGGACAUCGUCCGGG ACACUGGA | 3097 |
| 362 | CAGUGUGU G AAGAAGCG | 2715 | CGCUUCUU GGAGGAAACUCC CU UCAAGGACAUCGUCCGGG ACACACUG | 3098 |
| 365 | UGUGUGAA G AAGCGGGA | 2716 | UCCCGCUU GGAGGAAACUCC CU UCAAGGACAUCGUCCGGG UUCACACA | 3099 |
| 368 | GUGAAGAA G CGGGACCU | 1467 | AGGUCCCG GGAGGAAACUCC CU UCAAGGACAUCGUCCGGG UUCUUCAC | 3100 |
| 370 | GAAGAAGC G GGACCUGG | 2717 | CCAGGUCC GGAGGAAACUCC CU UCAAGGACAUCGUCCGGG GCUUCUUC | 3101 |
| 371 | AAGAAGCG G GACCUGGA | 2718 | UCCAGGUC GGAGGAAACUCC CU UCAAGGACAUCGUCCGGG CGCUUCUU | 3102 |
| 372 | AGAAGCGG G ACCUGGAG | 2719 | CUCCAGGU GGAGGAAACUCC CU UCAAGGACAUCGUCCGGG CCGCUUCU | 3103 |
| 377 | CGGGACCU G GAGCAGGC | 2720 | GCCUGCUC GGAGGAAACUCC CU UCAAGGACAUCGUCCGGG AGGUCCCG | 3104 |
| 378 | GGGACCUG G AGCAGGCU | 2721 | AGCCUGCU GGAGGAAACUCC CU UCAAGGACAUCGUCCGGG CAGGUCCC | 3105 |
| 380 | GACCUGGA G CAGGCUAU | 1468 | AUAGCCUG GGAGGAAACUCC CU UCAAGGACAUCGUCCGGG UCCAGGUC | 3106 |
| 383 | CUGGAGCA G GCUAUCAG | 2722 | CUGAUAGC GGAGGAAACUCC CU UCAAGGACAUCGUCCGGG UGCUCCAG | 3107 |
| 384 | UGGAGCAG G CUAUCAGU | 1469 | ACUGAUAG GGAGGAAACUCC CU UCAAGGACAUCGUCCGGG CUGCUCCA | 3108 |
| 391 | GGCUAUCA G UCAGCGCA | 1470 | UGCGCUGA GGAGGAAACUCC CU UCAAGGACAUCGUCCGGG UGAUAGCC | 3109 |
| 395 | AUCAGUCA G CGCAUCCA | 1471 | UGGAUGCG GGAGGAAACUCC CU UCAAGGACAUCGUCCGGG UGACUGAU | 3110 |
| 397 | CAGUCAGC G CAUCCAGA | 1472 | UCUGGAUG GGAGGAAACUCC CU UCAAGGACAUCGUCCGGG GCUGACUG | 3111 |
| 404 | CGCAUCCA G ACCAACAA | 2723 | UUGUUGGU GGAGGAAACUCC CU UCAAGGACAUCGUCCGGG UGGAUGCG | 3112 |
| 426 | CCUUCCAA G UUCCUAUA | 1473 | UAUAGGAA GGAGGAAACUCC CU UCAAGGACAUCGUCCGGG UUGGAAGG | 3113 |
| 435 | UUCCUAUA G AAGAGCAG | 2724 | CUGCUCUU GGAGGAAACUCC CU UCAAGGACAUCGUCCGGG UAUAGGAA | 3114 |
| 438 | CUAUAGAA G AGCAGCGU | 2725 | ACGCUGCU GGAGGAAACUCC CU UCAAGGACAUCGUCCGGG UUCUAUAG | 3115 |
| 440 | AUAGAAGA G CAGCGUGG | 1474 | CCACGCUG GGAGGAAACUCC CU UCAAGGACAUCGUCCGGG UCUUCUAU | 3116 |
| 443 | GAAGAGCA G CGUGGGGA | 1475 | UCCCCACG GGAGGAAACUCC CU UCAAGGACAUCGUCCGGG UGCUCUUC | 3117 |
| 445 | AGAGCAGC G UGGGGACU | 1476 | AGUCCCCA GGAGGAAACUCC CU UCAAGGACAUCGUCCGGG GCUGCUCU | 3118 |
| 447 | AGCAGCGU G GGGACUAC | 2726 | GUAGUCCC GGAGGAAACUCC CU UCAAGGACAUCGUCCGGG ACGCUGCU | 3119 |
| 448 | GCAGCGUG G GGACUACG | 2727 | CGUAGUCC GGAGGAAACUCC CU UCAAGGACAUCGUCCGGG CACGCUGC | 3120 |
| 449 | CAGCGUGG G GACUACGA | 2728 | UCGUAGUC GGAGGAAACUCC CU UCAAGGACAUCGUCCGGG CCACGCUG | 3121 |
| 450 | AGCGUGGG G ACUACGAC | 2729 | GUCGUAGU GGAGGAAACUCC CU UCAAGGACAUCGUCCGGG CCCACGCU | 3122 |
| 456 | GGGACUAC G ACCUGAAU | 2730 | AUUCAGGU GGAGGAAACUCC CU UCAAGGACAUCGUCCGGG GUAGUCCC | 3123 |
| 461 | UACGACCU G AAUGCUGU | 2731 | ACAGCAUU GGAGGAAACUCC CU UCAAGGACAUCGUCCGGG AGGUCGUA | 3124 |
| 465 | ACCUGAAU G CUGUGCGG | 1477 | CCGCACAG GGAGGAAACUCC CU UCAAGGACAUCGUCCGGG AUUCAGGU | 3125 |
| 468 | UGAAUGCU G UGCGGCUC | 1478 | GAGCCGCA GGAGGAAACUCC CU UCAAGGACAUCGUCCGGG AGCAUUCA | 3126 |
| 470 | AAUGCUGU G CGGCUCUG | 1479 | CAGAGCCG GGAGGAAACUCC CU UCAAGGACAUCGUCCGGG ACAGCAUU | 3127 |
| 472 | UGCUGUGC G GCUCUGCU | 2732 | AGCAGAGC GGAGGAAACUCC CU UCAAGGACAUCGUCCGGG GCACAGCA | 3128 |
| 473 | GCUGUGCG G CUCUGCUU | 1480 | AAGCAGAG GGAGGAAACUCC CU UCAAGGACAUCGUCCGGG CGCACAGC | 3129 |
| 478 | GCGGCUCU G CUUCCAGG | 1481 | CCUGGAAG GGAGGAAACUCC CU UCAAGGACAUCGUCCGGG AGAGCCGC | 3130 |
| 485 | UGCUUCCA G GUGACAGU | 2733 | ACUGUCAC GGAGGAAACUCC CU UCAAGGACAUCGUCCGGG UGGAAGCA | 3131 |
| 486 | GCUUCCAG G UGACAGUG | 1482 | CACUGUCA GGAGGAAACUCC CU UCAAGGACAUCGUCCGGG CUGGAAGC | 3132 |
| 488 | UUCCAGGU G ACAGUGCG | 2734 | CGCACUGU GGAGGAAACUCC CU UCAAGGACAUCGUCCGGG ACCUGGAA | 3133 |
| 492 | AGGUGACA G UGCGGGAC | 1483 | GUCCCGCA GGAGGAAACUCC CU UCAAGGACAUCGUCCGGG UGUCACCU | 3134 |
| 494 | GUGACAGU G CGGGACCC | 1484 | GGGUCCCG GGAGGAAACUCC CU UCAAGGACAUCGUCCGGG ACUGUCAC | 3135 |
| 496 | GACAGUGC G GGACCCAU | 2735 | AUGGGUCC GGAGGAAACUCC CU UCAAGGACAUCGUCCGGG GCACUGUC | 3136 |
| 497 | ACAGUGCG G GACCCAUC | 2736 | GAUGGGUC GGAGGAAACUCC CU UCAAGGACAUCGUCCGGG CGCACUGU | 3137 |
| 498 | CAGUGCGG G ACCCAUCA | 2737 | UGAUGGGU GGAGGAAACUCC CU UCAAGGACAUCGUCCGGG CCGCACUG | 3138 |
| 507 | ACCCAUCA G GCAGGCCC | 2738 | CGGCCUGC GGAGGAAACUCC CU UCAAGGACAUCGUCCGGG UGAUGCCU | 3139 |
| 508 | CCCAUCAG G CAGGCCCC | 1485 | CGGGCCUG GGAGGAAACUCC CU UCAAGGACAUCGUCCGGG CUGAUGGG | 3140 |
| 511 | AUCAGGCA G GCCCCUCC | 2739 | GGAGGGGC GGAGGAAACUCC CU UCAAGGACAUCGUCCGGG UGCCUGAU | 3141 |
| 512 | UCAGGCAG G CCCCUCCG | 1486 | CCGAGGGG GGAGGAAACUCC CU UCAAGGACAUCGUCCGGG CUGCCUGA | 3142 |
| 520 | GCCCCUCC G CCUGCCGC | 1487 | GCGGCAGG GGAGGAAACUCC CU UCAAGGACAUCGUCCGGG GGAGGGGC | 3143 |
| 524 | CUCCGCCU G CCGCCUGU | 1488 | ACAGGCGG GGAGGAAACUCC CU UCAAGGACAUCGUCCGGG AGGCGGAG | 3144 |
| 527 | CGCCUGCC G CCUGUCCU | 1489 | AGGACAGG GGAGGAAACUCC CU UCAAGGACAUCGUCCGGG GGCAGGCG | 3145 |
| 531 | UGCCGCCU G UCCUUUCU | 1490 | AGAAAGGA GGAGGAAACUCC CU UCAAGGACAUCGUCCGGG AGGCGGCA | 3146 |
| 552 | CCAUCUUU G ACAAUCGU | 2740 | ACGAUUGU GGAGGAAACUCC CU UCAAGGACAUCGUCCGGG AAAGAUGG | 3147 |
| 559 | UGACAAUC G UGCCCCCA | 1491 | UGGGGGCA GGAGGAAACUCC CU UCAAGGACAUCGUCCGGG GAUUGUCA | 3148 |
| 561 | ACAAUCGU G CCCCCAAC | 1492 | GUUGGGGG GGAGGAAACUCC CU UCAAGGACAUCGUCCGGG ACGAUUGU | 3149 |
| 573 | CCAACACU G CCGAGCUC | 1493 | GAGCUCGG GGAGGAAACUCC CU UCAAGGACAUCGUCCGGG AGUGUUGG | 3150 |
| 576 | ACACUGCC G AGCUCAAG | 2741 | CUUGAGCU GGAGGAAACUCC CU UCAAGGACAUCGUCCGGG GGCAGUGU | 3151 |
| 578 | ACUGCCGA G CUCAAGAU | 1494 | AUCUUGAG GGAGGAAACUCC CU UCAAGGACAUCGUCCGGG UCGGCAGU | 3152 |
| 584 | GAGCUCAA G AUCUGCCG | 2742 | CGGCAGAU GGAGGAAACUCC CU UCAAGGACAUCGUCCGGG UUGAGCUC | 3153 |
| 589 | CAAGAUCU G CCGAGUGA | 1495 | UCACUCGG GGAGGAAACUCC CU UCAAGGACAUCGUCCGGG AGAUCUUG | 3154 |
| 592 | GAUCUGCC G AGUGAACC | 2743 | GGUUCACU GGAGGAAACUCC CU UCAAGGACAUCGUCCGGG GGCAGAUC | 3155 |
| 594 | UCUGCCGA G UGAACCGA | 1496 | UCGGUUCA GGAGGAAACUCC CU UCAAGGACAUCGUCCGGG UCGGCAGA | 3156 |
| 596 | UGCCGAGU G AACCCAAA | 2744 | UUUCGGUU GGAGGAAACUCC CU UCAAGGACAUCGUCCGGG ACUCGGCA | 3157 |
| 601 | AGUGAACC G AAACUCUG | 2745 | CAGAGUUU GGAGGAAACUCC CU UCAAGGACAUCGUCCGGG GGUUCACU | 3158 |
| 609 | GAAACUCU G CCAGCUGC | 2746 | GCAGCUGC GGAGGAAACUCC CU UCAAGGACAUCGUCCGGG AGAGUUUC | 3159 |
| 610 | AAACUCUG G CAGCUGCC | 1497 | GGCAGCUG GGAGGAAACUCC CU UCAAGGACAUCGUCCGGG CAGAGUUU | 3160 |
| 613 | CUCUGGCA G CUGCCUCG | 1498 | CGAGGCAG GGAGGAAACUCC CU UCAAGGACAUCGUCCGGG UGCCAGAG | 3161 |
| 616 | UGGCAGCU G CCUCGGUG | 1499 | CACCGAGG GGAGGAAACUCC CU UCAAGGACAUCGUCCGGG AGCUGCCA | 3162 |
| 621 | GCUGCCUC G GUGGGGAU | 2747 | AUCCCCAC GGAGGAAACUCC CU UCAAGGACAUCGUCCGGG GAGGCAGC | 3163 |
| 622 | CUGCCUCG G UGGGGAUG | 1500 | CAUCCCCA GGAGGAAACUCC CU UCAAGGACAUCGUCCGGG CGAGGCAG | 3164 |
| 624 | GCCUCGGU G GGGAUGAG | 2748 | CUCAUCCC GGAGGAAACUCC CU UCAAGGACAUCGUCCGGG ACCGAGGC | 3165 |
| 625 | CCUCGGUG G GGAUGAGA | 2749 | UCUCAUCC GGAGGAAACUCC CU UCAAGGACAUCGUCCGGG CACCGAGG | 3166 |
| 626 | CUCGGUGG G GAUGAGAU | 2750 | AUCUCAUC GGAGGAAACUCC CU UCAAGGACAUCGUCCGGG CCACCGAG | 3167 |
| 627 | UCGGUGGG G AUGAGAUC | 2751 | GAUCUCAU GGAGGAAACUCC CU UCAAGGACAUCGUCCGGG CCCACCGA | 3168 |
| 630 | GUGGGGAU G AGAUCUUC | 2752 | GAAGAUCU GGAGGAAACUCC CU UCAAGGACAUCGUCCGGG AUCCCCAC | 3169 |
| 632 | GGGGAUGA G AUCUUCCU | 2753 | AGGAAGAU GGAGGAAACUCC CU UCAAGGACAUCGUCCGGG UCAUCCCC | 3170 |
| 644 | UUCCUACU G UGUGACAA | 1501 | UUGUCACA GGAGGAAACUCC CU UCAAGGACAUCGUCCGGG AGUAGGAA | 3171 |
| 646 | CCUACUGU G UGACAAGG | 1502 | CCUUGUCA GGAGGAAACUCC CU UCAAGGACAUCGUCCGGG ACAGUAGG | 3172 |
| 648 | UACUGUGU C ACAAGGUG | 2754 | CACCUUGU GGAGGAAACUCC CU UCAAGGACAUCGUCCGGG ACACAGUA | 3173 |
| 653 | UGUGACAA G GUGCAGAA | 2755 | UUCUGCAC GGAGGAAACUCC CU UCAAGGACAUCGUCCGGG UUGUCACA | 3174 |
| 654 | GUGACAAG G UGCAGAAA | 1503 | UUUCUGCA GGAGGAAACUCC CU UCAAGGACAUCGUCCGGG CUUGUCAC | 3175 |
| 656 | GACAAGGU G CAGAAAGA | 1504 | UCUUUCUG GGAGGAAACUCC CU UCAAGGACAUCGUCCGGG ACCUUGUC | 3176 |
| 659 | AAGGUGCA G AAAGAGGA | 2756 | UCCUCUUU GGAGGAAACUCC CU UCAAGGACAUCGUCCGGG UGCACCUU | 3177 |
| 663 | UGCAGAAA G AGGACAUU | 2757 | AAUGUCCU GGAGGAAACUCC CU UCAAGGACAUCGUCCGGG UUUCUGCA | 3178 |
| 665 | CAGAAAGA G GACAUUGA | 2758 | UCAAUGUC GGAGGAAACUCC CU UCAAGGACAUCGUCCGGG UCUUUCUG | 3179 |
| 666 | AGAAAGAG G ACAUUGAG | 2759 | CUCAAUGU GGAGGAAACUCC CU UCAAGGACAUCGUCCGGG CUCUUUCU | 3180 |
| 672 | AGGACAUU G AGGUGUAU | 2760 | AUACACCU GGAGGAAACUCC CU UCAAGGACAUCGUCCGGG AAUGUCCU | 3181 |
| 674 | GACAUUGA G GUGUAUUU | 2761 | AAAUACAC GGAGGAAACUCC CU UCAAGGACAUCGUCCGGG UCAAUGUC | 3182 |
| 675 | ACAUUGAG G UGUAUUUC | 1505 | GAAAUACA GGAGGAAACUCC CU UCAAGGACAUCGUCCGGG CUCAAUGU | 3183 |
| 677 | AUUGAGGU G UAUUUCAC | 1506 | GUGAAAUA GGAGGAAACUCC CU UCAAGGACAUCGUCCGGG ACCUCAAU | 3184 |
| 686 | UAUUUCAC G GGACCAGG | 2762 | CCUGGUCC GGAGGAAACUCC CU UCAAGGACAUCGUCCGGG GUGAAAUA | 3185 |
| 687 | AUUUCACG G GACCAGGC | 2763 | GCCUGGUC GGAGGAAACUCC CU UCAAGGACAUCGUCCGGG CGUGAAAU | 3186 |
| 688 | UUUCACGG G ACCAGGCU | 2764 | AGCCUGGU GGAGGAAACUCC CU UCAAGGACAUCGUCCGGG CCGUGAAA | 3187 |
| 693 | CGGGACCA G GCUGGGAG | 2765 | CUCCCAGC GGAGGAAACUCC CU UCAAGGACAUCGUCCGGG UGGUCCCG | 3188 |
| 694 | GGGACCAG G CUGGGAGG | 1507 | CCUCCCAG GGAGGAAACUCC CU UCAAGGACAUCGUCCGGG CUGGUCCC | 3189 |
| 697 | ACCAGGCU G GGAGGCCC | 2766 | GGGCCUCC GGAGGAAACUCC CU UCAAGGACAUCGUCCGGG AGCCUGGU | 3190 |
| 698 | CCAGGCUG G GAGGCCCG | 2767 | CGGGCCUC GGAGGAAACUCC CU UCAAGGACAUCGUCCGGG CAGCCUGG | 3191 |
| 699 | CAGGCUGG G AGGCCCGA | 2768 | UCGGGCCU GGAGGAAACUCC CU UCAAGGACAUCGUCCGGG CCAGCCUG | 3192 |
| 701 | GGCUGGGA G GCCCGAGG | 2769 | CCUCGGGC GGAGGAAACUCC CU UCAAGGACAUCGUCCGGG UCCCAGCC | 3193 |
| 702 | GCUGGGAG G CCCGAGGC | 1508 | GCCUCGGG GGAGGAAACUCC CU UCAAGGACAUCGUCCGGG CUCCCAGC | 3194 |
| 706 | GGAGGCCC G AGGCUCCU | 2770 | AGGAGCCU GGAGGAAACUCC CU UCAAGGACAUCGUCCGGG GGGCCUCC | 3195 |
| 708 | AGGCCCGA G GCUCCUUU | 2771 | AAAGGAGC GGAGGAAACUCC CU UCAAGGACAUCGUCCGGG UCGGGCCU | 3196 |
| 709 | GGCCCGAG G CUCCUUUU | 1509 | AAAAGGAG GGAGGAAACUCC CU UCAAGGACAUCGUCCGGG CUCGGGCC | 3197 |
| 719 | UCCUUUUC G CAAGCUGA | 1510 | UCAGCUUG GGAGGAAACUCC CU UCAAGGACAUCGUCCGGG GAAAAGGA | 3198 |
| 723 | UUUCGCAA G CUGAUGUG | 1511 | CACAUCAG GGAGGAAACUCC CU UCAAGGACAUCGUCCGGG UUGCGAAA | 3199 |
| 726 | CGCAAGCU G AUGUGCAC | 2772 | GUGCACAU GGAGGAAACUCC CU UCAAGGACAUCGUCCGGG AGUUUGCG | 3200 |
| 729 | AAGCUGAU G UGCACCGA | 1512 | UCGGUGCA GGAGGAAACUCC CU UCAAGGACAUCGUCCGGG AUCAGCUU | 3201 |
| 731 | GCUGAUGU G CACCGACA | 1513 | UGUCGGUG GGAGGAAACUCC CU UCAAGGACAUCGUCCGGG ACAUCAGC | 3202 |
| 736 | UGUGCACC G ACAAGUGG | 2773 | CCACUUGU GGAGGAAACUCC CU UCAAGGACAUCGUCCGGG GGUGCACA | 3203 |
| 741 | ACCGACAA G UGGCCAUU | 1514 | AAUGGCCA GGAGGAAACUCC CU UCAAGGACAUCGUCCGGG UUGUCGGU | 3204 |
| 743 | CGACAAGU G GCCAUUGU | 2774 | ACAAUGGC GGAGGAAACUCC CU UCAAGGACAUCGUCCGGG ACUUGUCG | 3205 |
| 744 | GACAAGUG G CCAUUGUG | 1515 | CACAAUGG GGAGGAAACUCC CU UCAAGGACAUCGUCCGGG CACUUGUC | 3206 |
| 750 | UGGCCAUU G UGUUCCGG | 1516 | CCGGAACA GGAGGAAACUCC CU UCAAGGACAUCGUCCGGG AAUGGCCA | 3207 |
| 752 | GCCAUUGU G UUCCGGAC | 1517 | GUCCGGAA GGAGGAAACUCC CU UCAAGGACAUCGUCCGGG ACAAUGGC | 3208 |
| 757 | UGUGUUCC G GACCCCUC | 2775 | GAGGGGUC GGAGGAAACUCC CU UCAAGGACAUCGUCCGGG GGAACACA | 3209 |
| 758 | GUGUUCCG G ACCCCUCC | 2776 | GGAGGGGU GGAGGAAACUCC CU UCAAGGACAUCGUCCGGG CCGAACAC | 3210 |
| 771 | CUCCCUAC G CAGACCCC | 1518 | GGGGUCUG GGAGGAAACUCC CU UCAAGGACAUCGUCCGGG GUAGGGAG | 3211 |
| 774 | CCUACGCA G ACCCCAGC | 2777 | GCUGGGGU GGAGGAAACUCC CU UCAAGGACAUCGUCCGGG UGCGUAGG | 3212 |
| 781 | AGACCCCA G CCUGCAGG | 1519 | CCUGCAGG GGAGGAAACUCC CU UCAAGGACAUCGUCCGGG UGGGGUCU | 3213 |
| 785 | CCCAGCCU G CAGGCUCC | 1520 | GGAGCCUG GGAGGAAACUCC CU UCAAGGACAUCGUCCGGG AGGCUGGG | 3214 |
| 788 | AGCCUGCA G GCUCCUGU | 2778 | ACAGGAGC GGAGGAAACUCC CU UCAAGGACAUCGUCCGGG UGCAGGCU | 3215 |
| 789 | GCCUGCAG G CUCCUGUG | 1521 | CACAGGAG GGAGGAAACUCC CU UCAAGGACAUCGUCCGGG CUGCAGGC | 3216 |
| 795 | AGGCUCCU G UGCGUGUC | 1522 | GACACGCA GGAGGAAACUCC CU UCAAGGACAUCGUCCGGG AGGAGCCU | 3217 |
| 797 | GCUCCUGU G CGUGUCUC | 1523 | GAGACACG GGAGGAAACUCC CU UCAAGGACAUCGUCCGGG ACAGGAGC | 3218 |
| 799 | UCCUGUGC G UGUCUCCA | 1524 | UGGAGACA GGAGGAAACUCC CU UCAAGGACAUCGUCCGGG GCACAGGA | 3219 |
| 801 | CUGUGCGU G UCUCCAUG | 1525 | CAUGGAGA GGAGGAAACUCC CU UCAAGGACAUCGUCCGGG ACGCACAG | 3220 |
| 809 | GUCUCCAU G CAGCUGCG | 1526 | CGCAGCUG GGAGGAAACUCC CU UCAAGGACAUCGUCCGGG AUGGAGAC | 3221 |
| 812 | UCCAUGCA G CUGCGGCG | 1527 | CGCCGCAG GGAGGAAACUCC CU UCAAGGACAUCGUCCGGG UGCAUGGA | 3222 |
| 815 | AUGCAGCU G CGGCGGCC | 1528 | GGCCGCCG GGAGGAAACUCC CU UCAAGGACAUCGUCCGGG AGCUGCAU | 3223 |
| 817 | GCAGCUGC G GCGGCCUU | 2779 | AAGGCCGC GGAGGAAACUCC CU UCAAGGACAUCGUCCGGG GCAGCUGC | 3224 |
| 818 | CAGCUGCG G CGGCCUUC | 1529 | GAAGGCCG GGAGGAAACUCC CU UCAAGGACAUCGUCCGGG CGCAGCUG | 3225 |
| 820 | GCUGCGGC G GCCUUCCG | 2780 | CGGAAGGC GGAGGAAACUCC CU UCAAGGACAUCGUCCGGG GCCGCAGC | 3226 |
| 821 | CUGCGGCG G CCUUCCGA | 1530 | UCGGAAGG GGAGGAAACUCC CU UCAAGGACAUCGUCCGGG CGCCGCAG | 3227 |
| 828 | GGCCUUCC G ACCGGGAG | 2781 | CUCCCGGU GGAGGAAACUCC CU UCAAGGACAUCGUCCGGG GGAAGGCC | 3228 |
| 832 | UUCCGACC G GGAGCUCA | 2782 | UGAGCUCC GGAGGAAACUCC CU UCAAGGACAUCGUCCGGG GGUCGGAA | 3229 |
| 833 | UCCGACCG G GAGCUCAG | 2783 | CUGAGCUC GGAGGAAACUCC CU UCAAGGACAUCGUCCGGG CGGUCGGA | 3230 |
| 834 | CCGACCGG G AGCUCAGU | 2784 | ACUGAGCU GGAGGAAACUCC CU UCAAGGACAUCGUCCGGG CCGGUCGG | 3231 |
| 836 | GACCGGGA G CUCAGUGA | 1531 | UCACUGAG GGAGGAAACUCC CU UCAAGGACAUCGUCCGGG UCCCGGUC | 3232 |
| 841 | GGAGCUCA G UGAGCCCA | 1532 | UGGGCUCA GGAGGAAACUCC CU UCAAGGACAUCGUCCGGG UGAGCUCC | 3233 |
| 843 | AGCUCAGU G AGCCCAUG | 2785 | CAUGGGCU GGAGGAAACUCC CU UCAAGGACAUCGUCCGGG ACUGAGCU | 3234 |
| 845 | CUCAGUGA G CCCAUGGA | 1533 | UCCAUGGG GGAGGAAACUCC CU UCAAGGACAUCGUCCGGG UCACUGAG | 3235 |
| 851 | GAGCCCAU G GAAUUCCA | 2786 | UGGAAUUC GGAGGAAACUCC CU UCAAGGACAUCGUCCGGG AUGGGCUC | 3236 |
| 852 | AGCCCAUG G AAUUCCAG | 2787 | CUGGAAUU GGAGGAAACUCC CU UCAAGGACAUCGUCCGGG CAUGGGCU | 3237 |
| 860 | GAAUUCCA G UACCUGCC | 1534 | GGCAGGUA GGAGGAAACUCC CU UCAAGGACAUCGUCCGGG UGGAAUUC | 3238 |
| 866 | CAGUACCU G CCAGAUAC | 1535 | GUAUCUGG GGAGGAAACUCC CU UCAAGGACAUCGUCCGGG AGGUACUG | 3239 |
| 870 | ACCUGCCA G AUACAGAC | 2788 | GUCUGUAU GGAGGAAACUCC CU UCAAGGACAUCGUCCGGG UGGCAGGU | 3240 |
| 876 | CAGAUACA G ACGAUCGU | 2789 | ACGAUCGU GGAGGAAACUCC CU UCAAGGACAUCGUCCGGG UGUAUCUG | 3241 |
| 879 | AUACAGAC G AUCGUCAC | 2790 | GUGACGAU GGAGGAAACUCC CU UCAAGGACAUCGUCCGGG GUCUGUAU | 3242 |
| 883 | AGACGAUC G UCACCGGA | 1536 | UCCGGUGA GGAGGAAACUCC CU UCAAGGACAUCGUCCGGG GAUCGUCU | 3243 |
| 889 | UCGUCACC G GAUUGAGG | 2791 | CCUCAAUC GGAGGAAACUCC CU UCAAGGACAUCGUCCGGG GGUGACGA | 3244 |
| 890 | CGUCACCG G AUUGAGGA | 2792 | UCCUCAAU GGAGGAAACUCC CU UCAAGGACAUCGUCCGGG CGGUGACG | 3245 |
| 894 | ACCGGAUU G AGGAGAAA | 2793 | UUUCUCCU GGAGGAAACUCC CU UCAAGGACAUCGUCCGGG AAUCCGGU | 3246 |
| 896 | CGGAUUGA G GAGAAACG | 2794 | CGUUUCUC GGAGGAAACUCC CU UCAAGGACAUCGUCCGGG UCAAUCCG | 3247 |
| 897 | GGAUUGAG G AGAAACGU | 2795 | ACGUUUCU GGAGGAAACUCC CU UCAAGGACAUCGUCCGGG CUCAAUCC | 3248 |
| 899 | AUUGAGGA G AAACGUAA | 2796 | UUACGUUU GGAGGAAACUCC CU UCAAGGACAUCGUCCGGG UCCUCAAU | 3249 |
| 904 | GGAGAAAC G UAAAAGGA | 1537 | UCCUUUUA GGAGGAAACUCC CU UCAAGGACAUCGUCCGGG GUUUCUCC | 3250 |
| 910 | ACGUAAAA G GACAUAUG | 2797 | CAUAUGUC GGAGGAAACUCC CU UCAAGGACAUCGUCCGGG UUUUACGU | 3251 |
| 911 | CGUAAAAG G ACAUAUGA | 2798 | UCAUAUGU GGAGGAAACUCC CU UCAAGGACAUCGUCCGGG CUUUUACG | 3252 |
| 918 | GGACAUAU G AGACCUUC | 2799 | GAAGGUCU GGAGGAAACUCC CU UCAAGGACAUCGUCCGGG AUAUGUCC | 3253 |
| 920 | ACAUAUGA G ACCUUCAA | 2800 | UUGAAGGU GGAGGAAACUCC CU UCAAGGACAUCGUCCGGG UCAUAUGU | 3254 |
| 929 | ACCUUCAA G AGCAUCAU | 2801 | AUGAUGCU GGAGGAAACUCC CU UCAAGGACAUCGUCCGGG UUGAAGGU | 3255 |
| 931 | CUUCAAGA G CAUCAUGA | 1538 | UCAUGAUG GGAGGAAACUCC CU UCAAGGACAUCGUCCGGG UCUUGAAG | 3256 |
| 938 | AGCAUCAU G AAGAAGAG | 2802 | CUCUUCUU GGAGGAAACUCC CU UCAAGGACAUCGUCCGGG AUGAUGCU | 3257 |
| 941 | AUCAUGAA G AAGAGUCC | 2803 | GGACUCUU GGAGGAAACUCC CU UCAAGGACAUCGUCCGGG UUCAUGAU | 3258 |
| 944 | AUGAAGAA G AGUCCUUU | 2804 | AAAGGACU GGAGGAAACUCC CU UCAAGGACAUCGUCCGGG UUCUUCAU | 3259 |
| 946 | GAAGAAGA G UCCUUUCA | 1539 | UGAAAGGA GGAGGAAACUCC CU UCAAGGACAUCGUCCGGG UCUUCUUC | 3260 |
| 955 | UCCUUUCA G CGGACCCA | 1540 | UGGGUCCG GGAGGAAACUCC CU UCAAGGACAUCGUCCGGG UGAAAGGA | 3261 |
| 957 | CUUUCAGC G GACCCACC | 2805 | GGUGGGUC GGAGGAAACUCC CU UCAAGGACAUCGUCCGGG GCUGAAAG | 3262 |
| 958 | UUUCAGCG G ACCCACCG | 2806 | CGGUGGGU GGAGGAAACUCC CU UCAAGGACAUCGUCCGGG CGCUGAAA | 3263 |
| 966 | GACCCACC G ACCCCCGG | 2807 | CCGGGGGU GGAGGAAACUCC CU UCAAGGACAUCGUCCGGG GGUGGGUC | 3264 |
| 973 | CGACCCCC G GCCUCCAC | 2808 | GUGGAGGC GGAGGAAACUCC CU UCAAGGACAUCGUCCGGG GGGGGUCG | 3265 |
| 974 | GACCCCCG G CCUCCACC | 1541 | GGUGGAGG GGAGGAAACUCC CU UCAAGGACAUCGUCCGGG CGGGGGUC | 3266 |
| 985 | UCCACCUC G ACGCAUUG | 2809 | CAAUGCGU GGAGGAAACUCC CU UCAAGGACAUCGUCCGGG GAGGUGGA | 3267 |
| 988 | ACCUCGAC G CAUUGCUG | 1542 | CAGCAAUG GGAGGAAACUCC CU UCAAGGACAUCGUCCGGG GUCGAGGU | 3268 |
| 993 | GACGCAUU G CUGUGCCU | 1543 | AGGCACAG GGAGGAAACUCC CU UCAAGGACAUCGUCCGGG AAUGCGUC | 3269 |
| 996 | GCAUUGCU G UGCCUUCC | 1544 | GGAAGGCA GGAGGAAACUCC CU UCAAGGACAUCGUCCGGG AGCAAUGC | 3270 |
| 998 | AUUGCUGU G CCUUCCCG | 1545 | CGGGAAGG GGAGGAAACUCC CU UCAAGGACAUCGUCCGGG ACAGCAAU | 3271 |
| 1006 | GCCUUCCC G CAGCUCAG | 1546 | CUGAGCUG GGAGGAAACUCC CU UCAAGGACAUCGUCCGGG GGGAAGGC | 3272 |
| 1009 | UUCCCGCA G CUCAGCUU | 1547 | AAGCUGAG GGAGGAAACUCC CU UCAAGGACAUCGUCCGGG UGCGGGAA | 3273 |
| 1014 | GCAGCUCA G CUUCUGUC | 1548 | GACAGAAG GGAGGAAACUCC CU UCAAGGACAUCGUCCGGG UGAGCUGC | 3274 |
| 1020 | CAGCUUCU G UCCCCAAG | 1549 | CUUGGGGA GGAGGAAACUCC CU UCAAGGACAUCGUCCGGG AGAAGCUG | 3275 |
| 1028 | GUCCCCAA G CCAGCACC | 1550 | GGUGCUGG GGAGGAAACUCC CU UCAAGGACAUCGUCCGGG UUGGGGAC | 3276 |
| 1032 | CCAAGCCA G CACCCCAG | 1551 | CUGGGGUG GGAGGAAACUCC CU UCAAGGACAUCGUCCGGG UGGCUUGG | 3277 |
| 1040 | GCACCCCA G CCCUAUCC | 1552 | GGAUAGGG GGAGGAAACUCC CU UCAAGGACAUCGUCCGGG UGGGGUGC | 3278 |
| 1055 | CCCUUUAC G UCAUCCCU | 1553 | AGGGAUGA GGAGGAAACUCC CU UCAAGGACAUCGUCCGGG GUAAAGGG | 3279 |
| 1064 | UCAUCCCU G AGCACCAU | 2810 | AUGGUGCU GGAGGAAACUCC CU UCAAGGACAUCGUCCGGG AGGGAUGA | 3280 |
| 1066 | AUCCCUGA G CACCAUCA | 1554 | UGAUGGUG GGAGGAAACUCC CU UCAAGGACAUCGUCCGGG UCAGGGAU | 3281 |
| 1080 | UCAACUAU G AUGAGUUU | 2811 | AAACUCAU GGAGGAAACUCC CU UCAAGGACAUCGUCCGGG AUAGUUGA | 3282 |
| 1083 | ACUAUGAU G AGUUUCCC | 2812 | GGGAAACU GGAGGAAACUCC CU UCAAGGACAUCGUCCGGG AUCAUAGU | 3283 |
| 1085 | UAUGAUGA G UUUCCCAC | 1555 | GUGGGAAA GGAGGAAACUCC CU UCAAGGACAUCGUCCGGG UCAUCAUA | 3284 |
| 1097 | CCCACCAU G GUGUUUCC | 2813 | GGAAACAC GGAGGAAACUCC CU UCAAGGACAUCGUCCGGG AUGGUGGG | 3285 |
| 1098 | CCACCAUG G UGUUUCCU | 1556 | AGGAAACA GGAGGAAACUCC CU UCAAGGACAUCGUCCGGG CAUGGUGG | 3286 |
| 1100 | ACCAUGGU G UUUCCUUC | 1557 | GAAGGAAA GGAGGAAACUCC CU UCAAGGACAUCGUCCGGG ACCAUGGU | 3287 |
| 1110 | UUCCUUCU G GGCAGAUC | 2814 | GAUCUGCC GGAGGAAACUCC CU UCAAGGACAUCGUCCGGG AGAAGGAA | 3288 |
| 1111 | UCCUUCUG G GCAGAUCA | 2815 | UGAUCUGC GGAGGAAACUCC CU UCAAGGACAUCGUCCGGG CAGAAGGA | 3289 |
| 1112 | CCUUCUGG G CAGAUCAG | 1558 | CUGAUCUG GGAGGAAACUCC CU UCAAGGACAUCGUCCGGG CCAGAAGG | 3290 |
| 1115 | UCUGGGCA G AUCAGCCA | 2816 | UGGCUGAU GGAGGAAACUCC CU UCAAGGACAUCGUCCGGG UGCCCAGA | 3291 |
| 1120 | GCAGAUCA G CCAGGCCU | 1559 | AGGCCUGG GGAGGAAACUCC CU UCAAGGACAUCGUCCGGG UGAUCUGC | 3292 |
| 1124 | AUCAGCCA G GCCUCGGC | 2817 | GCCGAGGC GGAGGAAACUCC CU UCAAGGACAUCGUCCGGG UGGCUGAU | 3293 |
| 1125 | UCAGCCAG G CCUCGGCC | 1560 | GGCCGAGG GGAGGAAACUCC CU UCAAGGACAUCGUCCGGG CUGGCUGA | 3294 |
| 1130 | CAGGCCUC G GCCUUGGC | 2818 | GCCAAGGC GGAGGAAACUCC CU UCAAGGACAUCGUCCGGG GAGGCCUG | 3295 |
| 1131 | AGGCCUCG G CCUUGGCC | 1561 | GGCCAAGG GGAGGAAACUCC CU UCAAGGACAUCGUCCGGG CGAGGCCU | 3296 |
| 1136 | UCGGCCUU G GCCCCGGC | 2819 | GCCGGGGC GGAGGAAACUCC CU UCAAGGACAUCGUCCGGG AAGGCCGA | 3297 |
| 1137 | CGGCCUUG G CCCCGGCC | 1562 | GGCCGGGG GGAGGAAACUCC CU UCAAGGACAUCGUCCGGG CAAGGCCG | 3298 |
| 1142 | UUGGCCCC G GCCCCUCC | 2820 | GGAGGGGC GGAGGAAACUCC CU UCAAGGACAUCGUCCGGG GGGGCCAA | 3299 |
| 1143 | UGGCCCCG G CCCCUCCC | 1563 | GGGAGGGG GGAGGAAACUCC CU UCAAGGACAUCGUCCGGG CGGGGCCA | 3300 |
| 1155 | CUCCCCAA G UCCUGCCC | 1564 | GGGCAGGA GGAGGAAACUCC CU UCAAGGACAUCGUCCGGG UUGGGGAG | 3301 |
| 1160 | CAAGUCCU G CCCCAGGC | 1565 | GCCUGGGG GGAGGAAACUCC CU UCAAGGACAUCGUCCGGG AGGACUUG | 3302 |
| 1166 | CUGCCCCA G GCUCCAGC | 2821 | GCUGGAGC GGAGGAAACUCC CU UCAAGGACAUCGUCCGGG UGGGGCAG | 3303 |
| 1167 | UGCCCCAG G CUCCAGCC | 1566 | GGCUGGAG GGAGGAAACUCC CU UCAAGGACAUCGUCCGGG CUGGGGCA | 3304 |
| 1173 | AGGCUCCA G CCCCUGCC | 1567 | GGCAGGGG GGAGGAAACUCC CU UCAAGGACAUCGUCCGGG UGGAGCCU | 3305 |
| 1179 | CAGCCCCU G CCCCUGCU | 1568 | AGCAGGGG GGAGGAAACUCC CU UCAAGGACAUCGUCCGGG AGGGGCUG | 3306 |
| 1185 | CUGCCCCU G CUCCAGCC | 1569 | GUCUGGAG GGAGGAAACUCC CU UCAAGGACAUCGUCCGGG AGGGGCAG | 3307 |
| 1191 | CUGCUCCA G CCAUGGUA | 1570 | UACCAUGG GGAGGAAACUCC CU UCAAGGACAUCGUCCGGG UGGAGCAG | 3308 |
| 1196 | CCAGCCAU G GUAUCAGC | 2822 | GCUGAUAC GGAGGAAACUCC CU UCAAGGACAUCGUCCGGG AUGGCUGG | 3309 |
| 1197 | CAGCCAUG G UAUCAGCU | 1571 | AGCUGAUA GGAGGAAACUCC CU UCAAGGACAUCGUCCGGG CAUGGCUG | 3310 |
| 1203 | UGGUAUCA G CUCUGGCC | 1572 | GUCCAGAG GGAGGAAACUCC CU UCAAGGACAUCGUCCGGG UGAUACCA | 3311 |
| 1208 | UCAGCUCU G GCCCAGGC | 2823 | UCCUUUGC GGAGGAAACUCC CU UCAAGGACAUCGUCCGGG AGAGCUGA | 3312 |
| 1209 | CAUCUCUG G CCCAGGCC | 1573 | GGCCUGGG GGAGGAAACUCC CU UCAAGGACAUCGUCCGGG CAGAGCUG | 3313 |
| 1214 | CUGGCCCA G GCCCCAGC | 2824 | UCUGGUUC GGAGGAAACUCC CU UCAAGGACAUCGUCCGGG UGGGCCAG | 3314 |
| 1215 | UGGCCCAG G CCCCAGCC | 1574 | GGCUGGGU GGAGGAAACUCC CU UCAAGGACAUCGUCCGGG CUGGGCCA | 3315 |
| 1221 | AUGCCCCA G CCCCUGUC | 1575 | GACAUGUG GGAGGAAACUCC CU UCAAGGACAUCGUCCGGG UGGGGCCU | 3316 |
| 1227 | CAGCCCCU G UCCCAGUC | 1576 | GACUGGGA GGAGGAAACUCC CU UCAAGGACAUCGUCCGGG AGGGGCUG | 3317 |
| 1233 | CUGUCCCA G UCCUAGCC | 1577 | GUCUAGGA GGAGGAAACUCC CU UCAAGGACAUCGUCCGGG UGGGACAG | 3318 |
| 1239 | CAGUCCUA G CCCCAGGC | 1578 | GCCUGGGG GGAGGAAACUCC CU UCAAGGACAUCGUCCGGG UAGGACUG | 3319 |
| 1245 | UAGCCCCA G GCCCUCCU | 2825 | AUGAUGUC GGAGGAAACUCC CU UCAAGGACAUCGUCCGGG UGGGGCUA | 3320 |
| 1246 | AGCCCCAG G CCCUCCUC | 1579 | GAUGAGGU GGAGGAAACUCC CU UCAAGGACAUCGUCCGGG CUGGGGCU | 3321 |
| 1256 | CCUCCUCA G GCUGUGGC | 2826 | GCCACAGC GGAGGAAACUCC CU UCAAGGACAUCGUCCGGG UGAGGAGG | 3322 |
| 1257 | CUCCUCAG G CUGUGGCC | 1380 | GGCCACAG GGAGGAAACUCC CU UCAAGGACAUCGUCCGGG CUGAGGAG | 3323 |
| 1260 | CUCAGGCU G UGGCCCCA | 1581 | UGGGGCCA GGAGGAAACUCC CU UCAAGGACAUCGUCCGGG AGCCUGAG | 3324 |
| 1262 | CAGGCUGU G GCCCCACC | 2827 | GGUGGGGC GGAGGAAACUCC CU UCAAGGACAUCGUCCGGG ACAUCCUG | 3325 |
| 1263 | AGGCUGUG G CCCCACCU | 1582 | AGGUGGGG GGAGGAAACUCC CU UCAAGGACAUCGUCCGGG CACAGCCU | 3326 |
| 1272 | CCCCACCU G CCCCCAAG | 1583 | CUUGGGGG GGAGGAAACUCC CU UCAAGGACAUCGUCCGGG AGGUGGGG | 3327 |
| 1280 | GCCCCCAA G CCCACCCA | 1584 | UGGGUGGG GGAGGAAACUCC CU UCAAGGACAUCGUCCGGG UUGGGGGC | 3328 |
| 1289 | CCCACCCA G GCUGGGGA | 2828 | UCCCCAGC GGAGGAAACUCC CU UCAAGGACAUCGUCCGGG UGGGUGGG | 3329 |
| 1290 | CCACCCAG G CUGGGGAA | 1585 | UUCCCCAG GGAGGAAACUCC CU UCAAGGACAUCGUCCGGG CUGGGUGG | 3330 |
| 1293 | CCCAGGCU G GGGAAGGA | 2829 | UCCUUCCC GGAGGAAACUCC CU UCAAGGACAUCGUCCGGG AGCCUGGG | 3331 |
| 1294 | CCAGGCUG G GGAAGGAA | 2830 | UUCCUUCC GGAGGAAACUCC CU UCAAGGACAUCGUCCGGG CAGCCUGG | 3332 |
| 1295 | CAGGCUGG G GAAGGAAC | 2831 | GUUCCUUC GGAGGAAACUCC CU UCAAGGACAUCGUCCGGG CCAGCCUG | 3333 |
| 1296 | AGGCUGGG G AAGGAACG | 2832 | CGUUCCUU GGAGGAAACUCC CU UCAAGGACAUCGUCCGGG CCCAGCCU | 3334 |
| 1299 | CUGGGGAA G GAACGCUG | 2833 | CAGCGUUC GGAGGAAACUCC CU UCAAGGACAUCGUCCGGG UUCCCCAG | 3335 |
| 1300 | UGGGGAAG G AACGCUGU | 2834 | ACAGCGUU GGAGGAAACUCC CU UCAAGGACAUCGUCCGGG CUUCCCCA | 3336 |
| 1304 | GAAGGAAC G CUGUCAGA | 1586 | UCUGACAG GGAGGAAACUCC CU UCAAGGACAUCGUCCGGG GUUCCUUC | 3337 |
| 1307 | GGAACGCU G UCAGAGGC | 1587 | GCCUCUGA GGAGGAAACUCC CU UCAAGGACAUCGUCCGGG AGCGUUCC | 3338 |
| 1311 | CGCUGUCA G AGGCCCUG | 2835 | CAGGGCCU GGAGGAAACUCC CU UCAAGGACAUCGUCCGGG UGACAGCG | 3339 |
| 1313 | CUGUCAGA G GCCCUGCU | 2836 | AGCAGGGC GGAGGAAACUCC CU UCAAGGACAUCGUCCGGG UCUGACAG | 3340 |
| 1314 | UGUCAGAG G CCCUGCUG | 1588 | CAGCAGGG GGAGGAAACUCC CU UCAAGGACAUCGUCCGGG CUCUGACA | 3341 |
| 1319 | GAGGCCCU G CUGCAGCU | 1589 | AGCUGCAG GGAGGAAACUCC CU UCAAGGACAUCGUCCGGG AGGGCCUC | 3342 |
| 1322 | GCCCUGCU G CAGCUGCA | 1590 | UGCAGCUG GGAGGAAACUCC CU UCAAGGACAUCGUCCGGG AGCAGGGC | 3343 |
| 1325 | CUGCUGCA G CUGCAGUU | 1591 | AACUGCAG GGAGGAAACUCC CU UCAAGGACAUCGUCCGGG UGCAGCAG | 3344 |
| 1328 | CUGCAGCU G CAGUUUGA | 1592 | UCAAACUG GGAGGAAACUCC CU UCAAGGACAUCGUCCGGG AGCUGCAG | 3345 |
| 1331 | CAGCUGCA G UUUGAUGA | 1593 | UCAUCAAA GGAGGAAACUCC CU UCAAGGACAUCGUCCGGG UGCAGCUG | 3346 |
| 1335 | UGCAGUUU G AUGAUGAA | 2837 | UUCAUCAU GGAGGAAACUCC CU UCAAGGACAUCGUCCGGG AAACUGCA | 3347 |
| 1338 | AGUUUGAU G AUGAAGAC | 2838 | GUCUUCAU GGAGGAAACUCC CU UCAAGGACAUCGUCCGGG AUCAAACU | 3348 |
| 1341 | UUGAUGAU G AAGACCUG | 2839 | CAGGUCUU GGAGGAAACUCC CU UCAAGGACAUCGUCCGGG AUCAUCAA | 3349 |
| 1344 | AUGAUGAA G ACCUGGGG | 2840 | CCCCAGGU GGAGGAAACUCC CU UCAAGGACAUCGUCCGGG UUCAUCAU | 3350 |
| 1349 | GAAGACCU G GGGGCCUU | 2841 | AAGGCCCC GGAGGAAACUCC CU UCAAGGACAUCGUCCGGG AGGUCUUC | 3351 |
| 1350 | AAGACCUG G GGGCCUUG | 2842 | CAAGGCCC GGAGGAAACUCC CU UCAAGGACAUCGUCCGGG CAGGUCUU | 3352 |
| 1351 | AGACCUGG G GGCCUUGC | 2843 | GCAAGGCC GGAGGAAACUCC CU UCAAGGACAUCGUCCGGG CCAGGUCU | 3353 |
| 1352 | GACCUGGG G GCCUUGCU | 2844 | AGCAAGGC GGAGGAAACUCC CU UCAAGGACAUCGUCCGGG CCCAGGUC | 3354 |
| 1353 | ACCUGGGG G CCUUGCUU | 1594 | AAGCAAGG GGAGGAAACUCC CU UCAAGGACAUCGUCCGGG CCCCAGGU | 3355 |
| 1358 | GGGGCCUU G CUUGGCAA | 1595 | UUGCCAAG GGAGGAAACUCC CU UCAAGGACAUCGUCCGGG AAGGCCCC | 3356 |
| 1362 | CCUUGCUU G GCAACAGC | 2845 | GCUGUUGC GGAGGAAACUCC CU UCAAGGACAUCGUCCGGG AAGCAAGG | 3357 |
| 1363 | CUUGCUUG G CAACAGCA | 1596 | UGCUGUUG GGAGGAAACUCC CU UCAAGGACAUCGUCCGGG CAAGCAAG | 3358 |
| 1369 | UGGCAACA G CACAGACC | 1597 | GGUCUGUG GGAGGAAACUCC CU UCAAGGACAUCGUCCGGG UGUUGCCA | 3359 |
| 1374 | ACAGCACA G ACCCAGCU | 2846 | AGCUGGGU GGAGGAAACUCC CU UCAAGGACAUCGUCCGGG UGUGCUGU | 3360 |
| 1380 | CAGACCCA G CUGUGUUC | 1598 | GAACACAG GGAGGAAACUCC CU UCAAGGACAUCGUCCGGG UGGGUCUG | 3361 |
| 1383 | ACCCAGCU G UGUUCACA | 1599 | UGUGAACA GGAGGAAACUCC CU UCAAGGACAUCGUCCGGG AGCUGGGU | 3362 |
| 1385 | CCAGCUGU G UUCACAGA | 1600 | UCUGUGAA GGAGGAAACUCC CU UCAAGGACAUCGUCCGGG ACAGCUGG | 3363 |
| 1392 | UGUUCACA G ACCUGGCA | 2847 | UGCCAGGU GGAGGAAACUCC CU UCAAGGACAUCGUCCGGG UGUGAACA | 3364 |
| 1397 | ACAGACCU G GCAUCCGU | 2848 | ACGGAUGC GGAGGAAACUCC CU UCAAGGACAUCGUCCGGG AGGUCUGU | 3365 |
| 1398 | CAGACCUG G CAUCCGUC | 1601 | GACGGAUG GGAGGAAACUCC CU UCAAGGACAUCGUCCGGG CAGGUCUG | 3366 |
| 1404 | UGGCAUCC G UCGACAAC | 1602 | GUUGUCGA GGAGGAAACUCC CU UCAAGGACAUCGUCCGGG GGAUGCCA | 3367 |
| 1407 | CAUCCGUC G ACAACUCC | 2849 | GGAGUUGU GGAGGAAACUCC CU UCAAGGACAUCGUCCGGG GACGGAUG | 3368 |
| 1416 | ACAACUCC G AGUUUCAG | 2850 | CUGAAACU GGAGGAAACUCC CU UCAAGGACAUCGUCCGGG GGAGUUGU | 3369 |
| 1418 | AACUCCGA G UUUCAGCA | 1603 | UGCUGAAA GGAGGAAACUCC CU UCAAGGACAUCGUCCGGG UCGGAGUU | 3370 |
| 1424 | GAGUUUCA G CAGCUGCU | 1604 | AGCAGCUG GGAGGAAACUCC CU UCAAGGACAUCGUCCGGG UGAAACUC | 3371 |
| 1427 | UUUCAGCA G CUGCUGAA | 1605 | UUCAGCAG GGAGGAAACUCC CU UCAAGGACAUCGUCCGGG UGCUGAAA | 3372 |
| 1430 | CAGCAGCU G CUGAACCA | 1606 | UGGUUCAG GGAGGAAACUCC CU UCAAGGACAUCGUCCGGG AGCUGCUG | 3373 |
| 1433 | CAGCUGCU G AACCAGGG | 2851 | CCCUGGUU GGAGGAAACUCC CU UCAAGGACAUCGUCCGGG AGCAGCUG | 3374 |
| 1439 | CUGAACCA G GGCAUACC | 2852 | GGUAUGCC GGAGGAAACUCC CU UCAAGGACAUCGUCCGGG UGGUUCAG | 3375 |
| 1440 | UGAACCAG G GCAUACCU | 2853 | AGGUAUGC GGAGGAAACUCC CU UCAAGGACAUCGUCCGGG CUGGUUCA | 3376 |
| 1441 | GAACCAGG G CAUACCUG | 1607 | CAGGUAUG GGAGGAAACUCC CU UCAAGGACAUCGUCCGGG CCUGGUUC | 3377 |
| 1449 | GCAUACCU G UGGCCCCC | 1608 | GGGGGCCA GGAGGAAACUCC CU UCAAGGACAUCGUCCGGG AGGUAUGC | 3378 |
| 1451 | AUACCUGU G GCCCCCCA | 2854 | UGGGGGGC GGAGGAAACUCC CU UCAAGGACAUCGUCCGGG ACAGGUAU | 3379 |
| 1452 | UACCUGUG G CCCCCCAC | 1609 | GUGGGGGG GGAGGAAACUCC CU UCAAGGACAUCGUCCGGG CACAGGUA | 3380 |
| 1467 | ACACAACU G AGCCCAUG | 2855 | CAUGGGCU GGAGGAAACUCC CU UCAAGGACAUCGUCCGGG AGUUGUGU | 3381 |
| 1469 | ACAACUGA G CCCAUGCU | 1610 | AGCAUGGG GGAGGAAACUCC CU UCAAGGACAUCGUCCGGG UCAGUUGU | 3382 |
| 1475 | GAGCCCAU G CUGAUGGA | 1611 | UCCAUCAG GGAGGAAACUCC CU UCAAGGACAUCGUCCGGG AUGGGCUC | 3383 |
| 1478 | CCCAUGCU G AUGGAGUA | 2856 | UACUCCAU GGAGGAAACUCC CU UCAAGGACAUCGUCCGGG AGCAUGGG | 3384 |
| 1481 | AUGCUGAU G GAGUACCC | 2857 | GGGUACUC GGAGGAAACUCC CU UCAAGGACAUCGUCCGGG AUCAGCAU | 3385 |
| 1482 | UGCUGAUG G AGUACCCU | 2858 | AGGGUACU GGAGGAAACUCC CU UCAAGGACAUCGUCCGGG CAUCAGCA | 3386 |
| 1484 | CUGAUGGA G UACCCUGA | 1612 | UCAGGGUA GGAGGAAACUCC CU UCAAGGACAUCGUCCGGG UCCAUCAG | 3387 |
| 1491 | AGUACCCU G AGGCUAUA | 2859 | UAUAGCCU GGAGGAAACUCC CU UCAAGGACAUCGUCCGGG AGGGUACU | 3388 |
| 1493 | UACCCUGA G GCUAUAAC | 2860 | GUUAUAGC GGAGGAAACUCC CU UCAAGGACAUCGUCCGGG UCAGGUUA | 3389 |
| 1494 | ACCCUGAG G CUAUAACU | 1613 | AGUUAUAG GGAGGAAACUCC CU UCAAGGACAUCGUCCGGG CUCAGGGU | 3390 |
| 1504 | UAUAACUC G CCUAGUGA | 1614 | UCACUAGG GGAGGAAACUCC CU UCAAGGACAUCGUCCGGG GAGUUAUA | 3391 |
| 1509 | CUCGCCUA G UGACAGCC | 1615 | GGCUGUCA GGAGGAAACUCC CU UCAAGGACAUCGUCCGGG UAGGCGAG | 3392 |
| 1511 | CGCCUAGU G ACAGCCCA | 2861 | UGGGCUGU GGAGGAAACUCC CU UCAAGGACAUCGUCCGGG ACUAUGCG | 3393 |
| 1515 | UAGUGACA G CCCAGAGG | 1616 | CCUCUGGG GGAGGAAACUCC CU UCAAGGACAUCGUCCGGG UGUCACUA | 3394 |
| 1520 | ACAGCCCA G AGGCCCCC | 2862 | GGGGGCCU GGAGGAAACUCC CU UCAAGGACAUCGUCCGGG UGGGCUGU | 3395 |
| 1522 | AGCCCAGA G GCCCCCCG | 2863 | CGGGGGGC GGAGGAAACUCC CU UCAAGGACAUCGUCCGGG UCUGGGCU | 3396 |
| 1523 | GCCCAGAG G CCCCCCGA | 1617 | UCGGGGGG GGAGGAAACUCC CU UCAAGGACAUCGUCCGGG CUCUGGGC | 3397 |
| 1530 | GGCCCCCC G ACCCAGCU | 2864 | AGCUGGGU GGAGGAAACUCC CU UCAAGGACAUCGUCCGGG GGGGGGCC | 3398 |
| 1536 | CCGACCCA G CUCCUGCU | 1618 | AGCAGGAG GGAGGAAACUCC CU UCAAGGACAUCGUCCGGG UGGGUCGG | 3399 |
| 1542 | CAGCUCCU G CUCCACUG | 1619 | CAGUGGAG GGAGGAAACUCC CU UCAAGGACAUCGUCCGGG AGGAGCUG | 3400 |
| 1550 | GCUCCACU G GGGGCCCC | 2865 | GGGGCCCC GGAGGAAACUCC CU UCAAGGACAUCGUCCGGG AGUGGAGC | 3401 |
| 1551 | CUCCACUG G GGGCCCCG | 2866 | CGGGGCCC GGAGGAAACUCC CU UCAAGGACAUCGUCCGGG CAGUGGAG | 3402 |
| 1552 | UCCACUGG G GGCCCCGG | 2867 | CCGGGGCC GGAGGAAACUCC CU UCAAGGACAUCGUCCGGG CCAGUGGA | 3403 |
| 1553 | CCACUGGG G GCCCCGGG | 2868 | CCCGGGGC GGAGGAAACUCC CU UCAAGGACAUCGUCCGGG CCCAGUGG | 3404 |
| 1554 | CACUGGGG G CCCCGGGG | 1620 | CCCCGGGG GGAGGAAACUCC CU UCAAGGACAUCGUCCGGG CCCCAGUG | 3405 |
| 1559 | GGGGCCCC G GGGCUCCC | 2869 | GGGAGCCC GGAGGAAACUCC CU UCAAGGACAUCGUCCGGG GGGGCCCC | 3406 |
| 1560 | GGGCCCCG G GGCUCCCC | 2870 | GGGGAGCC GGAGGAAACUCC CU UCAAGGACAUCGUCCGGG CGGGGCCC | 3407 |
| 1561 | GGCCCCGG G GCUCCCCA | 2871 | UGGGGAGC GGAGGAAACUCC CU UCAAGGACAUCGUCCGGG CCGGGGCC | 3408 |
| 1562 | GCCCCCGG G CUCCCCAA | 1621 | UUGGGGAG GGAGGAAACUCC CU UCAAGGACAUCGUCCGGG CCCGGGGC | 3409 |
| 1572 | UCCCCAAU G GCCUCCUU | 2872 | AAGGAGGC GGAGGAAACUCC CU UCAAGGACAUCGUCCGGG AUUGGGGA | 3410 |
| 1573 | CCCCAAUG G CCUCCUUU | 1622 | AAAGGAGG GGAGGAAACUCC CU UCAAGGACAUCGUCCGGG CAUUGGGG | 3411 |
| 1584 | UCCUUUCA G GAGAUGAA | 2873 | UUCAUCUC GGAGGAAACUCC CU UCAAGGACAUCGUCCGGG UGAAAGGA | 3412 |
| 1585 | CCUUUCAG G AGAUGAAG | 2874 | CUUCAUCU GGAGGAAACUCC CU UCAAGGACAUCGUCCGGG CUGAAAGG | 3413 |
| 1587 | UGUCAGGA G AUGAAGAC | 2875 | GUCUUCAU GGAGGAAACUCC CU UCAAGGACAUCGUCCGGG UCCUGAAA | 3414 |
| 1590 | CAGGAGAU G AAGACUUC | 2876 | GAAGUCUU GGAGGAAACUCC CU UCAAGGACAUCGUCCGGG AUCUCCUG | 3415 |
| 1593 | GAGAUGAA G ACUUCUCC | 2877 | GGAGAAGU GGAGGAAACUCC CU UCAAGGACAUCGUCCGGG UUCAUCUC | 3416 |
| 1608 | CCUCCAUU G CGGACAUG | 1623 | CAUGUCCG GGAGGAAACUCC CU UCAAGGACAUCGUCCGGG AAUGGAGG | 3417 |
| 1610 | UCCAUUGC G GACAUGGA | 2878 | UCCAUGUC GGAGGAAACUCC CU UCAAGGACAUCGUCCGGG GCAAUGGA | 3418 |
| 1611 | CCAUUGCG G ACAUGGAC | 2879 | GUCCAUGU GGAGGAAACUCC CU UCAAGGACAUCGUCCGGG CGCAAUGG | 3419 |
| 1616 | GCGGACAU G GACUUCUC | 2880 | GAGAAGUC GGAGGAAACUCC CU UCAAGGACAUCGUCCGGG AUGUCCGC | 3420 |
| 1617 | CGGACAUG G ACUUCUCA | 2881 | UGAGAAGU GGAGGAAACUCC CU UCAAGGACAUCGUCCGGG CAUGUCCG | 3421 |
| 1626 | ACUUCUCA G CCCUGCUG | 1624 | CAGCAGGG GGAGGAAACUCC CU UCAAGGACAUCGUCCGGG UGACAAGU | 3422 |
| 1631 | UCAGCCCU G CUGAGUCA | 1625 | UGACUCAG GGAGGAAACUCC CU UCAAGGACAUCGUCCGGG AGGGCUGA | 3423 |
| 1634 | GCCCUGCU G AGUCAGAU | 2882 | AUCUGACU GGAGGAAACUCC CU UCAAGGACAUCGUCCGGG AGCAGGGC | 3424 |
| 1636 | CCUGCUGA G UCAGAUCA | 1626 | UGAUCUGA GGAGGAAACUCC CU UCAAGGACAUCGUCCGGG UCAGCAGG | 3425 |
| 1640 | CUGAGUCA G AUCAGCUC | 2883 | GAGCUGAU GGAGGAAACUCC CU UCAAGGACAUCGUCCGGG UGACUCAG | 3426 |
| 1645 | UCAGAUCA G CUCCUAAG | 1627 | CUUAGGAG GGAGGAAACUCC CU UCAAGGACAUCGUCCGGG UCAUCUGA | 3427 |
| 1653 | GCUCCUAA G GGGGUGAC | 2884 | GUCACCCC GGAGGAAACUCC CU UCAAGGACAUCGUCCGGG UUAGGAGC | 3428 |
| 1654 | CUCCUAAG G GGGUGACG | 2885 | CGUCACCC GGAGGAAACUCC CU UCAAGGACAUCGUCCGGG CUUAGGAG | 3429 |
| 1655 | UCCUAAGG G GGUGACGC | 2886 | GCGUCACC GGAGGAAACUCC CU UCAAGGACAUCGUCCGGG CCUUAGGA | 3430 |
| 1656 | CCUAAGGG G GUGACGCC | 2887 | GGCCUCAC GGAGGAAACUCC CU UCAAGGACAUCGUCCGGG CCCUUAGG | 3431 |
| 1657 | CUAAGGGG G UGACGCCU | 1628 | AGGCGUCA GGAGGAAACUCC CU UCAAGGACAUCGUCCGGG CCCCUUAG | 3432 |
| 1659 | AAGGGCGU G ACGCCUGC | 2888 | GCAGGCGU GGAGGAAACUCC CU UCAAGGACAUCGUCCGGG ACCCCCUU | 3433 |
| 1662 | GGGGUGAC G CCUGCCCU | 1629 | AGGGCAGG GGAGGAAACUCC CU UCAAGGACAUCGUCCGGG GUCACCCC | 3434 |
| 1666 | UGACGCCU G CCCUCCCC | 1630 | GGGGAGGG GGAGGAAACUCC CU UCAAGGACAUCGUCCGGG AGGCGUCA | 3435 |
| 1676 | CCUCCCCA G AGCACUGG | 2889 | CCAGUGCU GGAGGAAACUCC CU UCAAGGACAUCGUCCGGG UCGGCAGG | 3436 |
| 1678 | UCCCCAGA G CACUGGUU | 1631 | AACCAGUG GGAGGAAACUCC CU UCAAGGACAUCGUCCGGG UCUGGGGA | 3437 |
| 1683 | AGAGCACU G GUUGCAGG | 2890 | CCUGCAAC GGAGGAAACUCC CU UCAAGGACAUCGUCCGGG AGUGCUCU | 3438 |
| 1684 | GAGCACUG G UUGCAGGG | 1632 | CCCUGCAA GGAGGAAACUCC CU UCAAGGACAUCGUCCGGG CAGUGCUC | 3439 |
| 1687 | CACUGGUU G CAGGGGAU | 1633 | AUCCCCUG GGAGGAAACUCC CU UCAAGGACAUCGUCCGGG AACCAGUG | 3440 |
| 1690 | UGGUUGCA G GGGAUUGA | 2891 | UCAAUCCC GGAGGAAACUCC CU UCAAGGACAUCGUCCGGG UGCAACCA | 3441 |
| 1691 | GGUUGCAG G GGAUUGAA | 2892 | UUCAAUCC GGAGGAAACUCC CU UCAAGGACAUCGUCCGGG CUGCAACC | 3442 |
| 1692 | GUUGCAGG G GAUUGAAG | 2893 | CUUCAAUC GGAGGAAACUCC CU UCAAGGACAUCGUCCGGG CCUGCAAC | 3443 |
| 1693 | UUGCAGGG G AUUGAAGC | 2894 | GCUUCAAU GGAGGAAACUCC CU UCAAGGACAUCGUCCGGG CCCUGCAA | 3444 |
| 1697 | AGGGGAUU G AAGCCCUC | 2895 | GAGGGCUU GGAGGAAACUCC CU UCAAGGACAUCGUCCGGG AAUCCCCU | 3445 |
| 1700 | GGAUUGAA G CCCUCCAA | 1634 | UUGGAGGG GGAGGAAACUCC CU UCAAGGACAUCGUCCGGG UUCAAUCC | 3446 |
| 1711 | CUCCAAAA G CACUUACG | 1635 | CGUAAGUG GGAGGAAACUCC CU UCAAGGACAUCGUCCGGG UUUUGGAG | 3447 |
| 1719 | GCACUUAC G GAUUCUGG | 2896 | CCAGAAUC GGAGGAAACUCC CU UCAAGGACAUCGUCCGGG GUAAGUGC | 3448 |
| 1720 | CACUUACG G AUUCUGGU | 2897 | ACCAGAAU GGAGGAAACUCC CU UCAAGGACAUCGUCCGGG CGUAAGUG | 3449 |
| 1726 | CGGAUUCU G CUGGGGUG | 2898 | CACCCCAC GGAGGAAACUCC CU UCAAGGACAUCGUCCGGG AGAAUCCG | 3450 |
| 1727 | GGAUUCUG G UGGGGUGU | 1636 | ACACCCCA GGAGGAAACUCC CU UCAAGGACAUCGUCCGGG CAGAAUCC | 3451 |
| 1729 | AUUCUGGU G GGGUGUGU | 2899 | ACACACCC GGAGGAAACUCC CU UCAAGGACAUCGUCCGGG ACCAGAAU | 3452 |
| 1730 | UUCUGGUG G GGUGUGUU | 2900 | AACACACC GGAGGAAACUCC CU UCAAGGACAUCGUCCGGG CACCAGAA | 3453 |
| 1731 | UCUGGUGG G GUGUGUUC | 2901 | GAACACAC GGAGGAAACUCC CU UCAAGGACAUCGUCCGGG CCACCAGA | 3454 |
| 1732 | CUGGUGGG G UGUGUUCC | 1637 | GGAACACA GGAGGAAACUCC CU UCAAGGACAUCGUCCGGG CCCACCAG | 3455 |
| 1734 | GGUGGGGU G UGUUCCAA | 1638 | UUGGAACA GGAGGAAACUCC CU UCAAGGACAUCGUCCGGG ACCCCACC | 3456 |
| 1736 | UGGGGUGU G UUCCAACU | 1639 | AGUUGGAA GGAGGAAACUCC CU UCAAGGACAUCGUCCGGG ACACCCCA | 3457 |
| 1745 | UUCCAACU G CCCCCAAC | 1640 | GUUGGGGG GGAGGAAACUCC CU UCAAGGACAUCGUCCGGG AGUUGGAA | 3458 |
| 1757 | CCAACUUU G UGGAUCUC | 1641 | GACAUCCA GGAGGAAACUCC CU UCAAGGACAUCGUCCGGG AAAGUUGG | 3459 |
| 1759 | AACUUUGU G GAUGUCUU | 2902 | AAGACAUC GGAGGAAACUCC CU UCAAGGACAUCGUCCGGG ACAAAGUU | 3460 |
| 1760 | ACUUUGUG G AUGUCUUC | 2903 | GAAGACAU GGAGGAAACUCC CU UCAAGGACAUCGUCCGGG CACAAAGU | 3461 |
| 1763 | UUGUGGAU G UCUUCCUU | 1642 | AAGGAAGA GGAGGAAACUCC CU UCAAGGACAUCGUCCGGG AUCCACAA | 3462 |
| 1772 | UCUUCCUU G GAGGGGGG | 2904 | CCCCCCUC GGAGGAAACUCC CU UCAAGGACAUCGUCCGGG AAGGAAGA | 3463 |
| 1773 | CUUCCUUG G AGGGGGGA | 2905 | UCCCCCCU GGAGGAAACUCC CU UCAAGGACAUCGUCCGGG CAAGGAAG | 3464 |
| 1775 | UCCUUGGA G GGGGGAGC | 2906 | GCUCCCCC GGAGGAAACUCC CU UCAAGGACAUCGUCCGGG UCCAAGGA | 3465 |
| 1776 | CCUUCGAG G GGGGAGCC | 2907 | GGCUCCCC GGAGGAAACUCC CU UCAAGGACAUCGUCCGGG CUCCAAGG | 3466 |
| 1777 | CUUGGAGG G GGGAGCCA | 2908 | UGGCUCCC GGAGGAAACUCC CU UCAAGGACAUCGUCCGGG CCUCCAAG | 3467 |
| 1778 | UUGGAGGG G GGAGCCAU | 2909 | AUGGCUCC GGAGGAAACUCC CU UCAAGGACAUCGUCCGGG CCCUCCAA | 3468 |
| 1779 | UGGAGGGG G GAGCCAUA | 2910 | UAUGGCUC GGAGGAAACUCC CU UCAAGGACAUCGUCCGGG CCCCUCCA | 3469 |
| 1780 | GGAGGGGG G AGCCAUAU | 2911 | AUAUGGCU GGAGGAAACUCC CU UCAAGGACAUCGUCCGGG CCCCCUCC | 3470 |
| 1782 | AGGGGGGA G CCAUAUUU | 1643 | AAAUAUGG GGAGGAAACUCC CU UCAAGGACAUCGUCCGGG UCCCCCCU | 3471 |
| 1803 | CUUUUAUU G UCAGUAUC | 1644 | GAUACUGA GGAGGAAACUCC CU UCAAGGACAUCGUCCGGG AAUAAAAG | 3472 |
| 1807 | UAUUGUCA G UAUCUGUA | 1645 | UACAGAUA GGAGGAAACUCC CU UCAAGGACAUCGUCCGGG UGACAAUA | 3473 |
| 1813 | CAGUAUCU G UAUCUCUC | 1646 | GAGAGAUA GGAGGAAACUCC CU UCAAGGACAUCGUCCGGG AGAUACUG | 3474 |
| 1831 | CUCUUUUU G GAGGUGCU | 2912 | AGCACCUC GGAGGAAACUCC CU UCAAGGACAUCGUCCGGG AAAAAGAG | 3475 |
| 1832 | UCUUUUUG G AGGUGCUU | 2913 | AAGCACCU GGAGGAAACUCC CU UCAAGGACAUCGUCCGGG CAAAAAGA | 3476 |
| 1834 | UUUUUGGA G GUGCUUAA | 2914 | UUAAGCAC GGAGGAAACUCC CU UCAAGGACAUCGUCCGGG UCCAAAAA | 3477 |
| 1835 | UUUUGGAG G UGCUUAAG | 1647 | CUUAAGCA GGAGGAAACUCC CU UCAAGGACAUCGUCCGGG CUCCAAAA | 3478 |
| 1837 | UUGGAGGU G CUUAAGCA | 1648 | UGCUUAAG GGAGGAAACUCC CU UCAAGGACAUCGUCCGGG ACCUCCAA | 3479 |
| 1843 | GUGCUUAA G CAGAAGCA | 1649 | UGCUUCUG GGAGGAAACUCC CU UCAAGGACAUCGUCCGGG UUAAGCAC | 3480 |
| 1846 | CUUAAGCA G AAGCAUUA | 2915 | UAAUGCUU GGAGGAAACUCC CU UCAAGGACAUCGUCCGGG UGCUUAAG | 3481 |
| 1849 | AAGCAGAA G CAUUAACU | 1650 | AGUUAAUG GGAGGAAACUCC CU UCAAGGACAUCGUCCGGG UUCUGCUU | 3482 |
| 1863 | ACUUCUCU G GAAAGGGG | 2916 | CCCCUUUC GGAGGAAACUCC CU UCAAGGACAUCGUCCGGG AGAGAAGU | 3483 |
| 1864 | CUUCUCUG G AAAGGGGG | 2917 | CCCCCUUU GGAGGAAACUCC CU UCAAGGACAUCGUCCGGG CAGAGAAG | 3484 |
| 1868 | UCUGGAAA G GGGGGAGC | 2918 | GCUCCCCC GGAGGAAACUCC CU UCAAGGACAUCGUCCGGG UUUCCAGA | 3485 |
| 1869 | CUGGAAAG G GGGGAGCU | 2919 | AGCUCCCC GGAGGAAACUCC CU UCAAGGACAUCGUCCGGG CUUUCCAG | 3486 |
| 1870 | UGGAAAGG G GGGAGCUG | 2920 | CAGCUCCC GGAGGAAACUCC CU UCAAGGACAUCGUCCGGG CCUUUCCA | 3487 |
| 1871 | GGAAAGGG G GGAGCUGG | 2921 | CCAGCUCC GGAGGAAACUCC CU UCAAGGACAUCGUCCGGG CCCUUUCC | 3488 |
| 1872 | GAAAGGGG G GAGCUGGG | 2922 | CCCAGCUC GGAGGAAACUCC CU UCAAGGACAUCGUCCGGG CCCCUUUC | 3489 |
| 1873 | AAAGGGGG G AGCUGGGG | 2923 | CCCCAGCU GGAGGAAACUCC CU UCAAGGACAUCGUCCGGG CCCCCUUU | 3490 |
| 1875 | AGGGGGGA G CUGGGGAA | 1651 | UUCCCCAG GGAGGAAACUCC CU UCAAGGACAUCGUCCGGG UCCCCCCU | 3491 |
| 1878 | GGGGAGCU G GGGAAACU | 2924 | AGUUUCCC GGAGGAAACUCC CU UCAAGGACAUCGUCCGGG AGCUCCCC | 3492 |
| 1879 | GGGAGCUG G GGAAACUC | 2925 | GAGUUUCC GGAGGAAACUCC CU UCAAGGACAUCGUCCGGG CAGCUCCC | 3493 |
| 1880 | GGAGCUGG G GAAACUCA | 2926 | UGAGUUUC GGAGGAAACUCC CU UCAAGGACAUCGUCCGGG CCAGCUCC | 3494 |
| 1881 | GAGCUGGG G AAACUCAA | 2927 | UUGAGUUU GGAGGAAACUCC CU UCAAGGACAUCGUCCGGG CCCAGCUC | 3495 |
| 1901 | UUUCCCCU G UCCUGAUG | 1652 | CAUCAGGA GGAGGAAACUCC CU UCAAGGACAUCGUCCGGG AGGGGAAA | 3496 |
| 1906 | CCUGUCCU G AUGGUCAG | 2928 | CUGACCAU GGAGGAAACUCC CU UCAAGGACAUCGUCCGGG AGGACAGG | 3497 |
| 1909 | GUCCUGAU G GUCAGCUC | 2929 | GAGCUGAC GGAGGAAACUCC CU UCAAGGACAUCGUCCGGG AUCAGGAC | 3498 |
| 1910 | UCCUGAUG G UCAGCUCC | 1653 | GGAGCUGA GGAGGAAACUCC CU UCAAGGACAUCGUCCGGG CAUCAGGA | 3499 |
| 1914 | GAUGGUCA G CUCCCUUC | 1654 | GAAGGGAG GGAGGAAACUCC CU UCAAGGACAUCGUCCGGG UGACCAUC | 3500 |
| 1926 | CCUUCUCU G UAGGGAAC | 1655 | GUUCCCUA GGAGGAAACUCC CU UCAAGGACAUCGUCCGGG AGAGAAGG | 3501 |
| 1929 | UCUCUGUA G GGAACUGU | 2930 | ACAGUUCC GGAGGAAACUCC CU UCAAGGACAUCGUCCGGG UACAGAGA | 3502 |
| 1930 | CUCUGUAG G GAACUGUG | 2931 | CACAGUUC GGAGGAAACUCC CU UCAAGGACAUCGUCCGGG CUACAGAG | 3503 |
| 1931 | UCUGUAGG G AACUGUGG | 2932 | CCACAGUU GGAGGAAACUCC CU UCAAGGACAUCGUCCGGG CCUACAGA | 3504 |
| 1936 | AGGGAACU G UGGGGUCC | 1656 | GGACCCCA GGAGGAAACUCC CU UCAAGGACAUCGUCCGGG AGUUCCCU | 3505 |
| 1938 | GGAACUGU G GGGUCCCC | 2933 | GGGGACCC GGAGGAAACUCC CU UCAAGGACAUCGUCCGGG ACAGUUCC | 3506 |
| 1939 | GAACUGUG G GGUCCCCC | 2934 | GGGGGACC GGAGGAAACUCC CU UCAAGGACAUCGUCCGGG CACAGUUC | 3507 |
| 1940 | AACUGUGG G GUCCCCCA | 2935 | UGGGGGAC GGAGGAAACUCC CU UCAAGGACAUCGUCCGGG CCACAGUU | 3508 |
| 1941 | ACUGUGGG G UCCCCCAU | 1657 | AUGGGGGA GGAGGAAACUCC CU UCAAGGACAUCGUCCGGG CCCACAGU | 3509 |
| 1962 | AUCCUCCA G CUUCUGGU | 1658 | ACCAGAAG GGAGGAAACUCC CU UCAAGGACAUCGUCCGGG UGGAGGAU | 3510 |
| 1968 | CAGCUUCU G GUACUCUC | 2936 | GAGAGUAC GGAGGAAACUCC CU UCAAGGACAUCGUCCGGG AGAAGCUG | 3511 |
| 1969 | AGCUUCUG G UACUCUCC | 1659 | GGAGAGUA GGAGGAAACUCC CU UCAAGGACAUCGUCCGGG CAGAAGCU | 3512 |
| 1980 | CUCUCCUA G AGACAGAA | 2937 | UUCUGUCU GGAGGAAACUCC CU UCAAGGACAUCGUCCGGG UAGGAGAG | 3513 |
| 1982 | CUCCUAGA G ACAGAAGC | 2938 | GCUUCUGU GGAGGAAACUCC CU UCAAGGACAUCGUCCGGG UCUAGGAG | 3514 |
| 1986 | UAGAGACA G AAGCAGGC | 2939 | GCCUGCUU GGAGGAAACUCC CU UCAAGGACAUCGUCCGGG UGUCUCUA | 3515 |
| 1989 | AGACAGAA G CAGGCUGG | 1660 | CCAGCCUG GGAGGAAACUCC CU UCAAGGACAUCGUCCGGG UUCUGUCU | 3516 |
| 1992 | CAGAAGCA G GCUGGAGG | 2940 | CCUCCAGC GGAGGAAACUCC CU UCAAGGACAUCGUCCGGG UGCUUCUG | 3517 |
| 1993 | AGAAGCAG G CUGGAGGU | 1661 | ACCUCCAG GGAGGAAACUCC CU UCAAGGACAUCGUCCGGG CUGCUUCU | 3518 |
| 1996 | AGCAGGCU G GAGGUAAG | 2941 | CUUACCUC GGAGGAAACUCC CU UCAAGGACAUCGUCCGGG AGCCUGCU | 3519 |
| 1997 | GCAGGCUG G AGGUAAGG | 2942 | CCUUACCU GGAGGAAACUCC CU UCAAGGACAUCGUCCGGG CAGCCUGC | 3520 |
| 1999 | AGGCUGGA G GUAAGGCC | 2943 | GGCCUUAC GGAGGAAACUCC CU UCAAGGACAUCGUCCGGG UCCAGCCU | 3521 |
| 2000 | GGCUGGAG G UAAGGCCU | 1662 | AGGCCUUA GGAGGAAACUCC CU UCAAGGACAUCGUCCGGG CUCCAGCC | 3522 |
| 2004 | GGAGGUAA G GCCUUUGA | 2944 | UCAAAGGC GGAGGAAACUCC CU UCAAGGACAUCGUCCGGG UUACCUCC | 3523 |
| 2005 | GAGGUAAG G CCUUUGAG | 1663 | CUCAAAGG GGAGGAAACUCC CU UCAAGGACAUCGUCCGGG CUUACCUC | 3524 |
| 2011 | AGGCCUUU G AGCCCACA | 2945 | UGUGGGCU GGAGGAAACUCC CU UCAAGGACAUCGUCCGGG AAAGGCCU | 3525 |
| 2013 | GCCUUUGA G CCCACAAA | 1664 | UUUGUGGG GGAGGAAACUCC CU UCAAGGACAUCGUCCGGG UCAAAGGC | 3526 |
| 2022 | CCCACAAA G CCUUAUCA | 1665 | UGAUAAGG GGAGGAAACUCC CU UCAAGGACAUCGUCCGGG UUUGUGGG | 3527 |
| 2032 | CUUAUCAA G UGUCUUCC | 1666 | GGAAGACA GGAGGAAACUCC CU UCAAGGACAUCGUCCGGG UUGAUAAG | 3528 |
| 2034 | UAUCAAGU G UCUUCCAU | 1667 | AUGGAAGA GGAGGAAACUCC CU UCAAGGACAUCGUCCGGG ACUUGAUA | 3529 |
| 2046 | UCCAUCAU G GAUUCAUU | 2946 | AAUGAAUC GGAGGAAACUCC CU UCAAGGACAUCGUCCGGG AUGAUGGA | 3530 |
| 2047 | CCAUCAUG G AUUCAUUA | 2947 | UAAUGAAU GGAGGAAACUCC CU UCAAGGACAUCGUCCGGG CAUGAUGG | 3531 |
| 2058 | UCAUUACA G CUUAAUCA | 1668 | UGAUUAAG GGAGGAAACUCC CU UCAAGGACAUCGUCCGGG UGUAAUGA | 3532 |
| 2074 | AAAAUAAC G CCCCAGAU | 1669 | AUCUGGGG GGAGGAAACUCC CU UCAAGGACAUCGUCCGGG GUUAUUUU | 3533 |
| 2080 | ACGCCCCA G AUACCAGC | 2948 | GCUGGUAU GGAGGAAACUCC CU UCAAGGACAUCGUCCGGG UGGGGCGU | 3534 |
| 2087 | AGAUACCA G CCCCUGUA | 1670 | UACAGGGG GGAGGAAACUCC CU UCAAGGACAUCGUCCGGG UGGUAUCU | 3535 |
| 2093 | CAGCCCCU G UAUGGCAC | 1671 | GUGCCAUA GGAGGAAACUCC CU UCAAGGACAUCGUCCGGG AGGGGCUG | 3536 |
| 2097 | CCCUGUAU G GCACUGGC | 2949 | GCCAGUGC GGAGGAAACUCC CU UCAAGGACAUCGUCCGGG AUACAGGG | 3537 |
| 2098 | CCUGUAUG G CACUGGCA | 1672 | UGCCAGUG GGAGGAAACUCC CU UCAAGGACAUCGUCCGGG CAUACAGG | 3538 |
| 2103 | AUGGCACU G GCAUUGUC | 2950 | GACAAUGC GGAGGAAACUCC CU UCAAGGACAUCGUCCGGG AGUGCCAU | 3539 |
| 2104 | UGGCACUG G CAUUGUCC | 1673 | GGACAAUG GGAGGAAACUCC CU UCAAGGACAUCGUCCGGG CAGUGCCA | 3540 |
| 2109 | CUGGCAUU G UCCCUGUG | 1674 | CACAGGGA GGAGGAAACUCC CU UCAAGGACAUCGUCCGGG AAUGCCAG | 3541 |
| 2115 | UUGUCCCU G UGCCUAAC | 1675 | GUUAGGCA GGAGGAAACUCC CU UCAAGGACAUCGUCCGGG AGGGACAA | 3542 |
| 2117 | GUCCCUGU G CCUAACAC | 1676 | GUGUUAGG GGAGGAAACUCC CU UCAAGGACAUCGUCCGGG ACAGGGAC | 3543 |
| 2128 | UAACACCA G CGUUUGAG | 1677 | CUCAAACG GGAGGAAACUCC CU UCAAGGACAUCGUCCGGG UGGUGUUA | 3544 |
| 2130 | ACACCAGC G UUUGAGGG | 1678 | CCCUCAAA GGAGGAAACUCC CU UCAAGGACAUCGUCCGGG GCUGGUGU | 3545 |
| 2134 | CAGCGUUU G AGGGGCUG | 2951 | CAGCCCCU GGAGGAAACUCC CU UCAAGGACAUCGUCCGGG AAACGCUG | 3546 |
| 2136 | GCGUUUGA G GGGCUGCC | 2952 | GGCAGCCC GGAGGAAACUCC CU UCAAGGACAUCGUCCGGG UCAAACGC | 3547 |
| 2137 | CGUUUGAG G GGCUGCCU | 2953 | AGGCAGCC GGAGGAAACUCC CU UCAAGGACAUCGUCCGGG CUCAAACG | 3548 |
| 2138 | GUUUGAGG G GCUGCCUU | 2954 | AAGGCAGC GGAGGAAACUCC CU UCAAGGACAUCGUCCGGG CCUCAAAC | 3549 |
| 2139 | UUUGAGGG G CUGCCUUC | 1679 | GAAGGCAG GGAGGAAACUCC CU UCAAGGACAUCGUCCGGG CCCUCAAA | 3550 |
| 2142 | GAGGGGCU G CCUUCCUG | 1680 | CAGGAAGG GGAGGAAACUCC CU UCAAGGACAUCGUCCGGG AGCCCCUC | 3551 |
| 2150 | GCCUUCCU G CCCUACAG | 1681 | CUGUAGGG GGAGGAAACUCC CU UCAAGGACAUCGUCCGGG AGGAAGGC | 3552 |
| 2158 | GCCCUACA G AGGUCUCU | 2955 | AGAGACCU GGAGGAAACUCC CU UCAAGGACAUCGUCCGGG UGUAGGGC | 3553 |
| 2160 | CCUACAGA G GUCUCUGC | 2956 | GCAGAGAC GGAGGAAACUCC CU UCAAGGACAUCGUCCGGG UCUGUAGG | 3554 |
| 2161 | CUACAGAG G UCUCUGCC | 1682 | GGCAGAGA GGAGGAAACUCC CU UCAAGGACAUCGUCCGGG CUCUGUAG | 3555 |
| 2167 | AGGUCUCU G CCGGCUCU | 1683 | AGAGCCGG GGAGGAAACUCC CU UCAAGGACAUCGUCCGGG AGAGACCU | 3556 |
| 2170 | UCUCUGCC G GCUCUUUC | 2957 | GAAAGAGC GGAGGAAACUCC CU UCAAGGACAUCGUCCGGG GGCAGAGA | 3557 |
| 2171 | CUCUGCCG G CUCUUUCC | 1684 | GGAAAGAG GGAGGAAACUCC CU UCAAGGACAUCGUCCGGG CGGCAGAG | 3558 |
| 2182 | CUUUCCUU G CUCAACCA | 1685 | UGGUUGAG GGAGGAAACUCC CU UCAAGGACAUCGUCCGGG AAGGAAAG | 3559 |
| 2192 | UCAACCAU G GCUGAAGG | 2958 | CCUUCAGC GGAGGAAACUCC CU UCAAGGACAUCGUCCGGG AUGGUUGA | 3560 |
| 2193 | CAACCAUG G CUGAAGGA | 1686 | UCCUUCAG GGAGGAAACUCC CU UCAAGGACAUCGUCCGGG CAUGGUUG | 3561 |
| 2196 | CCAUGGCU G AAGGAAAC | 2959 | CUUUCCUU GGAGGAAACUCC CU UCAAGGACAUCGUCCGGG AGCCAUGG | 3562 |
| 2199 | UGGCUGAA G GAAACAGU | 2960 | ACUGUUUC GGAGGAAACUCC CU UCAAGGACAUCGUCCGGG UUCAGCCA | 3563 |
| 2200 | GGCUGAAG G AAACAGUG | 2961 | CACUGUUU GGAGGAAACUCC CU UCAAGGACAUCGUCCGGG CUUCAGCC | 3564 |
| 2206 | AGGAAACA G UGCAACAG | 1687 | CUGUUGCA GGAGGAAACUCC CU UCAAGGACAUCGUCCGGG UGUUUCCU | 3565 |
| 2208 | GAAACAGU G CAACAGCA | 1688 | UGCUGUUG GGAGGAAACUCC CU UCAAGGACAUCGUCCGGG ACUGUUUC | 3566 |
| 2214 | GUGCAACA G CACUGGCU | 1689 | AGCCAGUG GGAGGAAACUCC CU UCAAGGACAUCGUCCGGG UGUUGCAC | 3567 |
| 2219 | ACAGCACU G GCUCUCUC | 2962 | GAGAGAGC GGAGGAAACUCC CU UCAAGGACAUCGUCCGGG AGUGCUGU | 3568 |
| 2220 | CAGCACUG G CUCUCUCC | 1690 | GGAGAGAG GGAGGAAACUCC CU UCAAGGACAUCGUCCGGG CAGUGCUG | 3569 |
| 2230 | UCUCUCCA G GAUCCAGA | 2963 | UCUGGAUC GGAGGAAACUCC CU UCAAGGACAUCGUCCGGG UGGAGAGA | 3570 |
| 2231 | CUCUCCAG G AUCCAGAA | 2964 | UUCUGGAU GGAGGAAACUCC CU UCAAGGACAUCGUCCGGG CUGGAGAG | 3571 |
| 2237 | AGGAUCCA G AAGGGGUU | 2965 | AACCCCUU GGAGGAAACUCC CU UCAAGGACAUCGUCCGGG UGGAUCCU | 3572 |
| 2240 | AUCCAGAA G GGGUUUGG | 2966 | CCAAACCC GGAGGAAACUCC CU UCAAGGACAUCGUCCGGG UUCUGGAU | 3573 |
| 2241 | UCCAGAAG G GGUUUGGU | 2967 | ACCAAACC GGAGGAAACUCC CU UCAAGGACAUCGUCCGGG CUUCUGGA | 3574 |
| 2242 | CCAGAAGG G GUUUGGUC | 2968 | GACCAAAC GGAGGAAACUCC CU UCAAGGACAUCGUCCGGG CCUUCUGG | 3575 |
| 2243 | CAGAAGGG G UUUGGUCU | 1691 | AGACCAAA GGAGGAAACUCC CU UCAAGGACAUCGUCCGGG CCCUUCUG | 3576 |
| 2247 | AGGGGUUU G GUCUGGAC | 2969 | GUCCAGAC GGAGGAAACUCC CU UCAAGGACAUCGUCCGGG AAACCCCU | 3577 |
| 2248 | GGGGUUUG G UCUGGACU | 1692 | AGUCCAGA GGAGGAAACUCC CU UCAAGGACAUCGUCCGGG CAAACCCC | 3578 |
| 2252 | UUUGGUCU G GACUUCCU | 2970 | AGGAAGUC GGAGGAAACUCC CU UCAAGGACAUCGUCCGGG AGACCAAA | 3579 |
| 2253 | UUGGUCUG G ACUUCCUU | 2971 | AAGGAAGU GGAGGAAACUCC CU UCAAGGACAUCGUCCGGG CAGACCAA | 3580 |
| 2262 | ACUUCCUU G CUCUCCCC | 1693 | GGGGAGAG GGAGGAAACUCC CU UCAAGGACAUCGUCCGGG AAGGAAGU | 3581 |
| 2280 | CUUCUCAA G UGCCUUAA | 1694 | UUAAGGCA GGAGGAAACUCC CU UCAAGGACAUCGUCCGGG UUGAGAAG | 3582 |
| 2282 | UCUCAAGU G CCUUAAUA | 1695 | UAUUAAGG GGAGGAAACUCC CU UCAAGGACAUCGUCCGGG ACUUGAGA | 3583 |
| 2291 | CCUUAAUA G UAGGGUAA | 1696 | UUACCCUA GGAGGAAACUCC CU UCAAGGACAUCGUCCGGG UAUUAAGG | 3584 |
| 2294 | UAAUAGUA G GGUAAGUU | 2972 | AACUUACC GGAGGAAACUCC CU UCAAGGACAUCGUCCGGG UACUAUUA | 3585 |
| 2295 | AAUAGUAG G GUAAGUUG | 2973 | CAACUUAC GGAGGAAACUCC CU UCAAGGACAUCGUCCGGG CUACUAUU | 3586 |
| 2296 | AUAGUAGG G UAAGUUGU | 1697 | ACAACUUA GGAGGAAACUCC CU UCAAGGACAUCGUCCGGG CCUACUAU | 3587 |
| 2300 | UAGGGUAA G UUGUUAAG | 1698 | CUUAACAA GGAGGAAACUCC CU UCAAGGACAUCGUCCGGG UUACCCUA | 3588 |
| 2303 | GGUAAGUU G UUAAGAGU | 1699 | ACUCUUAA GGAGGAAACUCC CU UCAAGGACAUCGUCCGGG AACUUACC | 3589 |
| 2308 | GUUGUUAA G AGUGGGGG | 2974 | CCCCCACU GGAGGAAACUCC CU UCAAGGACAUCGUCCGGG UUAACAAC | 3590 |
| 2310 | UGUUAAGA G UGGGGGAG | 1700 | CUCCCCCA GGAGGAAACUCC CU UCAAGGACAUCGUCCGGG UCUUAACA | 3591 |
| 2312 | UUAAGAGU G GGGGAGAC | 2975 | CUCUCCCC GGAGGAAACUCC CU UCAAGGACAUCGUCCGGG ACUCUUAA | 3592 |
| 2313 | UAAGAGUG G GGGAGAGC | 2976 | GCUCUCCC GGAGGAAACUCC CU UCAAGGACAUCGUCCGGG CACUCUUA | 3593 |
| 2314 | AAGAGUGG G GGAGAGCA | 2977 | UGCUCUCC GGAGGAAACUCC CU UCAAGGACAUCGUCCGGG CCACUCUU | 3594 |
| 2315 | AGAGUGGG G GAGAGCAG | 2978 | CUGCUCUC GGAGGAAACUCC CU UCAAGGACAUCGUCCGGG CCCACUCU | 3595 |
| 2316 | GAGUGGGG G AGAGCAGG | 2979 | CCUGCUCU GGAGGAAACUCC CU UCAAGGACAUCGUCCGGG CCCCACUC | 3596 |
| 2318 | GUGGGGGA G AGCAGGCU | 2980 | AGCCUGCU GGAGGAAACUCC CU UCAAGGACAUCGUCCGGG UCCCCCAC | 3597 |
| 2320 | GGGGGAGA G CAGGCUGG | 1701 | CCAGCCUG GGAGGAAACUCC CU UCAAGGACAUCGUCCGGG UCUCCCCC | 3598 |
| 2323 | GGAGAGCA G GCUGGCAG | 2981 | CUGCCAGC GGAGGAAACUCC CU UCAAGGACAUCGUCCGGG UGCUCUCC | 3599 |
| 2324 | GAGAGCAG G CUGGCAGC | 1702 | GCUGCCAG GGAGGAAACUCC CU UCAAGGACAUCGUCCGGG CUGCUCUC | 3600 |
| 2327 | AGCAGGCU G GCAGCUCU | 2982 | AGAGCUGC GGAGGAAACUCC CU UCAAGGACAUCGUCCGGG AGCCUGCU | 3601 |
| 2328 | GCAGGCUG G CAGCUCUC | 1703 | GAGAGCUG GGAGGAAACUCC CU UCAAGGACAUCGUCCGGG CAGCCUGC | 3602 |
| 2331 | GGCUGGCA G CUCUCCAG | 1704 | CUGGAGAG GGAGGAAACUCC CU UCAAGGACAUCGUCCGGG UGCCAGCC | 3603 |
| 2339 | GCUCUCCA G UCAGGAGG | 1705 | CCUCCUGA GGAGGAAACUCC CU UCAAGGACAUCGUCCGGG UGGAGAGC | 3604 |
| 2343 | UCCAGUCA G GAGGCAUA | 2983 | UAUGCCUC GGAGGAAACUCC CU UCAAGGACAUCGUCCGGG UGACUGGA | 3605 |
| 2344 | CCAGUCAG G AGGCAUAG | 2984 | CUAUGCCU GGAGGAAACUCC CU UCAAGGACAUCGUCCGGG CUGACUGG | 3606 |
| 2346 | AGUCAGGA G GCAUAGUU | 2985 | AACUAUGC GGAGGAAACUCC CU UCAAGGACAUCGUCCGGG UCCUGACU | 3607 |
| 2347 | GUCAGGAG G CAUAGUUU | 1706 | AAACUAUG GGAGGAAACUCC CU UCAAGGACAUCGUCCGGG CUCCUGAC | 3608 |
| 2352 | GAGGCAUA G UUUUUAGU | 1707 | ACUAAAAA GGAGGAAACUCC CU UCAAGGACAUCGUCCGGG UAUGCCUC | 3609 |
| 2359 | AGUUUUUA G UGAACAAU | 1708 | AUUGUUCA GGAGGAAACUCC CU UCAAGGACAUCGUCCGGG UAAAAACU | 3610 |
| 2361 | UUUUUAGU G AACAAUCA | 2986 | UGAUUGUU GGAGGAAACUCC CU UCAAGGACAUCGUCCGGG ACUAAAAA | 3611 |
| 2372 | CAAUCAAA G CACUUGGA | 1709 | UCCAAGUG GGAGGAAACUCC CU UCAAGGACAUCGUCCGGG UUUGAUUG | 3612 |
| 2378 | AAGCACUU G GACUCUUG | 2987 | CAAGAGUC GGAGGAAACUCC CU UCAAGGACAUCGUCCGGG AAGUGCUU | 3613 |
| 2379 | AGCACUUG G ACUCUUGC | 2988 | GCAAGAGU GGAGGAAACUCC CU UCAAGGACAUCGUCCGGG CAAGUGCU | 3614 |
| 2386 | GGACUCUU G CUCUUUCU | 1710 | AGAAAGAG GGAGGAAACUCC CU UCAAGGACAUCGUCCGGG AAGAGUCC | 3615 |
| 2400 | UCUACUCU G AACUAAUA | 2989 | UAUUAGUU GGAGGAAACUCC CU UCAAGGACAUCGUCCGGG AGAGUAGA | 3616 |
| 2411 | CUAAUAAA G CUGUUGCC | 1711 | GGCAACAG GGAGGAAACUCC CU UCAAGGACAUCGUCCGGG UUUAUUAG | 3617 |
| 2414 | AUAAAGCU G UUGCCAAG | 1712 | CUUGGCAA GGAGGAAACUCC CU UCAAGGACAUCGUCCGGG AGCUUUAU | 3618 |
| 2417 | AAGCUGUU G CCAAGCUG | 1713 | CAGCUUGG GGAGGAAACUCC CU UCAAGGACAUCGUCCGGG AACAGCUU | 3619 |
| 2422 | GUUGCCAA G CUGGACGG | 1714 | CCGUCCAG GGAGGAAACUCC CU UCAAGGACAUCGUCCGGG UUGGCAAC | 3620 |
| 2425 | GCCAAGCU G GACGGCAC | 2990 | GUGCCGUC GGAGGAAACUCC CU UCAAGGACAUCGUCCGGG AGCUUGGC | 3621 |
| 2426 | CCAAGCUG G ACGGCACG | 2991 | CGUGCCGU GGAGGAAACUCC CU UCAAGGACAUCGUCCGGG CAGCUUGG | 3622 |
| 2429 | AGCUGGAC G GCACGAGC | 2992 | GCUCGUGC GGAGGAAACUCC CU UCAAGGACAUCGUCCGGG GUCCAGCU | 3623 |
| 2430 | GCUGGACG G CACGAGCU | 1715 | AGCUCGUG GGAGGAAACUCC CU UCAAGGACAUCGUCCGGG CGUCCAGC | 3624 |
| 2434 | GACGGCAC G AGCUCGUG | 2993 | CACGAGCU GGAGGAAACUCC CU UCAAGGACAUCGUCCGGG GUGCCGUC | 3625 |
| 2436 | CGGCACGA G CUCGUGCC | 1716 | GGCACGAG GGAGGAAACUCC CU UCAAGGACAUCGUCCGGG UCGUGCCG | 3626 |

Input Sequence = NM_021975. Cut Site = G/. Arm Length = 8. Core Sequence = GGAGGAAACUCC CU UCAAGGACAUCGUCCGGG NM_021975 (Homo sapiens p65 RelA (NFKB), mRNA; 2444 bp)

[0262] TABLE VII

Human REL-A Nucleic Acid and Target molecules

| | | | | | | |
|---|---|---|---|---|---|---|
| Pos | Target | Seq ID | RPI# | Enzymatic Nucleic Acid | Seq ID | Alias |

| | | | | | | |
|---|---|---|---|---|---|---|
| 262 | CCACCAUCAAGAUCA | 3627 | 6167 | UGAUCUUCUGAUGAGGCCG | 3770 | NFKB-262 Rz-7 |
| | | | | AAAGGCCGAAAUGGUGG | | |
| 303 | GCAUCUCCCUGGU | 3628 | 6168 | ACCAGGCUGAUGAGGCCGA | 3772 | NFKB-303 Rz-6 |
| | | | | AAGGCCGAAAGAUGC | | |
| 508 | CCAAGUUCCUAUA | 3629 | 6169 | UAUAGGCUGAUGAGGCCGA | 3772 | NFKB-508 Rz-6 |
| | | | | AAGGCCGAAACUUGG | | |
| 661 | CGAGCUCAAGAUC | 3630 | 6170 | GAUCUUCUGAUGAGGCCGA | 3773 | NFKB-661 Rz-6 |
| | | | | AAGGCCGAAAGCUCG | | |
| 759 | AGGUGUAUUUCAC | 3631 | 6171 | GUGAAACUGAUGAGGCCGA | 3774 | NFKB-759 Rz-6 |
| | | | | AAGGCCGAAACACCU | | |
| 883 | CGUGUCUCCAU | 3632 | 6172 | AUGGACUGAUGAGGCCGAA | 3775 | NFKB-883 Rz-5 |
| | | | | AGGCCGAAACACG | | |
| 1028 | AAGAGUCCUUUCA | 3633 | 6173 | UGAAAGCUGAUGAGGCCGA | 3776 | NFKB-1028 Rz-6 |
| | | | | AAGGCCGAAACUCUU | | |
| 1579 | GCUAUAACUCG | 3634 | 6174 | CGAGUCUGAUGAGGCCGAA | 3777 | NFKB-1579 Rz-5 |
| | | | | AGGCCGAAAUAGC | | |
| 1683 | ACUUCUCOUCCAU | 3635 | 6175 | AUGGAGCUGAUGAGGCCGA | 3778 | NFKB-1683 Rz-6 |
| | | | | AAGGCCGAAAGAAGU | | |
| 1726 | GUCAGAUCAGCUCCU | 3636 | 6176 | AGGAGCUCUGAUGAGGCCG | 3779 | NFKB-1726 Rz-7 |
| | | | | AAAGGCCGAAAUCUGAC | | |
| 413 | CCACAGUUUCCAGA | 3637 | 6178 | UCUGGAAGAAGUGGACCAGAGAAAC | 3780 | NFKB-413 HP-4/6 |
| | | | | ACACGUUGUGGUACAUUACCUGGUA | | |
| 159 | ACAGAUACCACCA | 3638 | 24047 | uₛgₛgₛuₛggcUGAuGagg | 3781 | NFKB-159 Rz-6 allyl stab1 |
| | | | | ccguuaggccGaaAucuguB | | |
| 159 | CACAGAUACCACCAA | 3639 | 24048 | uₛuₛgₛgₛuggcUGAuGag | 3782 | NFKB-159 Rz-7 allyl stab1 |
| | | | | gccguuaggccGaaAucugugB | | |
| 196 | AUGGCUACACAGG | 3640 | 24049 | cₛcₛuₛgₛugcUGAuGagg | 3783 | NFKB-196 Rz-6 allyl stab1 |
| | | | | ccguuaggccGaaAgccauB | | |
| 581 | CGAGCUCAAGAUC | 3630 | 24050 | gₛaₛuₛcₛuucUGAuGagg | 3784 | NFK8-581 Rz-6 allyl stab1 |
| | | | | ccguuaggccGaaAgcucgB | | |
| 581 | CCGAGCUCAAGAUCU | 3641 | 24051 | aₛgₛaₛuₛcuucUGAuGag | 3785 | NFKB-581 Rz-7 allyl stab1 |
| | | | | gccguuaggccGaaAgcucggB | | |
| 679 | AGGUGUAUUUCAC | 3631 | 24052 | gₛuₛgₛaₛaacUGAuGaggccg | 3786 | NFKB-679 Rz-6 allyl stab1 |
| | | | | uuaggccGaaAcaccuB | | |
| 682 | UGUAUUUCACGGG | 3642 | 24053 | cₛcₛcₛgₛugcUGAuGaggccg | 3787 | NFKB-682 Rz-6 allyl stab1 |
| | | | | uuaggccGaaAauacaB | | |
| 682 | GUGUAUUUCACGGGA | 3643 | 24054 | uₛcₛcₛcₛgugcUGAuGaggcc | 3788 | NFKB-682 Rz-7 allyl stab1 |
| | | | | guuaggccGaaAauacacB | | |
| 683 | UGUAUUUCACGGGAC | 3644 | 24055 | gₛuₛcₛcₛcgucUGAuGaggcc | 3789 | NFKB-683 Rz-7 allyl stab1 |
| | | | | guuaggccGaaAaauacaB | | |
| 712 | GAGGCUCCUUUUC | 3645 | 24056 | gₛaₛaₛaₛagcUGAuGaggccg | 3790 | NFKB-712 Rz-6 allyl stab1 |
| | | | | uuaggccGaaAgccucB | | |
| 754 | UUGUGUUCCGGAC | 3646 | 24057 | gₛuₛcₛcₛggcUGAuGaggccg | 3791 | NFKB-754 Rz-6 allyl stab1 |
| | | | | uuaggccGaaAcacaaB | | |
| 925 | AGACCUUCAAGAG | 3647 | 24058 | cₛuₛcₛuₛugcUGAuGaggcog | 3792 | NFKB-925 Rz-6 allyl stab1 |
| | | | | uuaggccGaaAggucuB | | |
| 1022 | UUCUGUCCCCAAG | 3648 | 24059 | cₛuₛuₛgₛggcUGAuGaggccg | 3793 | NFKB-1022 Rz-6 allyl stab1 |
| | | | | uuaggccGaaAcagaaB | | |
| 1022 | CUUCUGUCCCCAAGC | 3649 | 24060 | gₛcₛuₛuₛgggcUGAuGaggcc | 3794 | NFKB-1022 Rz-7 allyl stab1 |
| | | | | guuaggccGaaAcagaagB | | |
| 1486 | UGGAGUACOCUGA | 3650 | 24061 | uₛcₛaₛgₛggcUGAuGaggccg | 3795 | NFKB-1486 Rz-6 allyl stab1 |
| | | | | uuaggccGaaAcuccaB | | |
| 1600 | GACUUCUCCUCCAUU | 3651 | 24062 | aₛaₛuₛgₛgagcUGAUGaggcc | 3796 | NFkB-1600 Rz-7 allyl stab1 |
| | | | | guuaggccGaaAgaagucB | | |
| 1603 | UUCUCCUCCAUUGCG | 3652 | 24063 | cₛgₛcₛaₛaugcUGAuGaggccg | 3797 | NFKB-1603 Rz-7 allyl stab1 |
| | | | | uuaggccGaaAggagaaB | | |
| 1643 | GUCAGAUCAGCUCCU | 3636 | 24064 | aₛgₛgₛaₛgcucuGAuGaggccg | 3798 | NFKB-1643 Rz-7 allyl stab1 |
| | | | | uuaggccGaaAucugacB | | |
| 2383 | UGGACUCUUGCUC | 3653 | 24065 | gₛaₛgₛcₛaacuGAuGaggccgu | 3799 | NFKB-2383 Rz-6 allyl stab1 |
| | | | | uaggccGaaAguccaB | | |
| 2383 | UUGGACUCUUGCUCU | 3654 | 24066 | aₛgₛaₛgₛcaacUGAuGaggccg | 3800 | NFKB-2383 Rz-7 allyl stab1 |
| | | | | uuaggccGaaAguccaaB | | |
| 2385 | GACUCUUGCUCUU | 3655 | 24067 | aₛaₛgₛaₛgccUGAuGaggccgu | 3801 | NFKB-2385 Rz-6 allyl stab1 |
| | | | | uaggccGaaAgagucB | | |
| 2385 | GGACUCUUGCUCUUU | 3656 | 24068 | aₛaₛaₛgₛagccUGAuGaggccg | 3802 | NFKB-2385 Rz-7 allyl stab1 |
| | | | | uuaggccGaaAgaguccB | | |
| 2389 | CUUGCUCUUUCUA | 3657 | 24069 | uₛaₛgₛaₛaacUGAuGaggccgu | 3803 | NFKB-2389 Rz-6 allyl stab1 |
| | | | | uaggccGaaAgcaagB | | |
| control | ACGACUCGUUCGA | 3658 | 24070 | uₛcₛgₛaₛaccUAGuGacgcc | 3804 | NFKB-CtrI Rz-6 allyl (SAC) |
| | | | | guuaggcgGaaAgucguB | | |
| control | AGCCUGUAUACCGCG | 3659 | 24071 | cₛgₛoₛgₛguacUAGUGacg | 3805 | NFKB-CtrI Rz-7 allyl (SAC) |
| | | | | ccguuaggcgGaaAcaggcuB | | |
| 162 | GAUACCACCAAGA | 3660 | 24092 | uₛcₛuₛuₛggcUGAuGaggccg | 3806 | NFKB-162 CHz-6 allyl stab1 |
| | | | | uUaggccGaaIguaucB | | |
| 162 | AGAUACCACCAAGAC | 3661 | 24093 | gₛuₛcₛuₛuggoUGAUGaggc | 3807 | NFKB-162 CHz-7 allyl stab1 |
| | | | | cguuaggccGaaIguaucuB | | |
| 180 | CCCACCAUCAAGA | 3662 | 24094 | uₛcₛuₛuₛgacUGAuGaggcc | 3808 | NFKB-180 CHz-6 allyl stab1 |
| | | | | guuaggccGaaIgugggB | | |
| 183 | ACCAUCAAGAUCA | 3663 | 24095 | uₛgₛaₛuₛcucUGAuGaggcc | 3809 | NFKB-183 CHz-6 allyl stab1 |
| | | | | guuaggccGaaIaugguB | | |
| 183 | CACCAUCAAGAUCAA | 3664 | 24096 | uₛuₛgₛaₛuoucUGAuGaggc | 3810 | NFKB-183 CHz-7 allyl stab1 |
| | | | | cguuaggcoGaaIauggugB | | |
| 189 | AAGAUCAAUGGCU | 3665 | 24097 | aₛgₛcₛcₛaucUGAuGaggccg | 3811 | NFKB-189 CHz-6 allyl stab1 |
| | | | | uuagccGaaIaucuuB | | |
| 189 | CAAGAUCAAUGGCUA | 3666 | 24098 | uₛaₛgₛcₛcaucUGAuGaggc | 3812 | NFKB-189 CHz-7 allyl stab1 |
| | | | | cguuaggccGaaIaucuugB | | |
| 195 | AAUGGCUACACAG | 3667 | 24099 | cₛuₛgₛuₛgucUGAuGaggcc | 3813 | NFKB-195 CHz-6 allyl stab1 |
| | | | | guuaggccGaaIccauuB | | |
| 195 | CAAUGGCUACACAGG | 3668 | 24100 | cₛcₛuₛgₛugucUGAuGaggcc | 3814 | NFKB-195 CHz-7 allyl stab1 |
| | | | | guuaggccGaaIccauugB | | |
| 285 | GACUGCCGGGAUG | 3669 | 24101 | cₛaₛuₛcₛcccUGAuGaggcc | 3815 | NFKB-285 CHz-6 allyl stab1 |
| | | | | guuaggccGaaIcagucB | | |
| 480 | CUCUGCUUCCAGG | 3670 | 24102 | cₛcₛuₛgₛgacUGAuGaggcc | 3816 | NFKB-480 CHz-6 allyl stab1 |
| | | | | guuaggocGaalcagagB | | |
| 491 | GGUGACAGUGCGG | 3671 | 24103 | cₛcₛgₛcₛaccUGAuGaggcc | 3817 | NFKB-491 CHz-6 allyl stab1 |
| | | | | guuaggccGaaIucaccB | | |
| 491 | AGGUGACAGUGCGGG | 3672 | 24104 | cₛcₛcₛgₛcaccUGAUGaggcc | 3818 | NFKB-491 CHz-7 allyl stab1 |
| | | | | guuaggccGaaIucaccuB | | |
| 575 | CACUGCCGAGCUC | 3673 | 24105 | gₛaₛgₛcₛuccUGAuGaggcc | 3819 | NFKB-575 CHz-6 allyl stab1 |
| | | | | guuaggccGaaIcagugB | | |
| 575 | ACACUGCCGAGCUCA | 3674 | 24106 | uₛgₛaₛgₛcuccUGAuGaggcc | 3820 | NFKB-575 CHz-7 allyl stab1 |
| | | | | guuaggccGaaIcaguguB | | |
| 580 | CCGAGCUCAAGAU | 3675 | 24107 | aₛuₛcₛuₛugcUGAUGaggcc | 3821 | NFKB-580 CHz-6 allyl stab1 |
| | | | | guuaggccGaaIcucggB | | |
| 582 | GAGCUCAAGAUCU | 3676 | 24108 | aₛgₛaₛuₛcuoUGAuGaggccg | 3822 | NFKB-582 CHz-6 allyl stab1 |
| | | | | uuaggccGaaIagcucB | | |
| 658 | AGGUGCAGAAAGA | 3677 | 24109 | uₛcₛuₛuₛuccUGAuGaggcc | 3823 | NFKB-658 CHz-6 allyl stab1 |
| | | | | guuaggccGaaIcaccuB | | |
| 684 | GUAUUUCACGGGACC | 3678 | 24110 | gₛgₛuₛcₛccgcUGAuGaggcc | 3824 | NFKB-684 CHz-7 allyl stab1 |
| | | | | guuaggcoGaaIaaauaaB | | |
| 692 | GGGACCAGGCUGG | 3679 | 24111 | cₛcₛaₛgₛcccUGAuGaggcc | 3825 | NFKB-692 CHz-6 allyl stab1 |
| | | | | guuaggccGaaIgucccB | | |
| 746 | AGUGGCCAUUGUG | 3680 | 24112 | cₛaₛcₛaₛaucUGAuGaggcc | 3826 | NFkB-746 CHz-6 allyl stab1 |
| | | | | guuaggcoGaaIccacuB | | |
| 746 | AAGUGGCCAUUGUGU | 3681 | 24113 | aₛ0ₛaₛcₛaucUGAuGaggccg | 3827 | NFKB-746 CHz-7 allyl stab1 |
| | | | | uuaggccGaaIccacuuB | | |
| 747 | GUGGCCAUUGUGU | 3682 | 24114 | aₛcₛaₛcₛaacUGAuGaggcc | 3828 | NFKB-747 CHz-6 allyl stab1 |
| | | | | guuaggccGaaIgccacB | | |
| 747 | AGUGGCCAUUGUGUU | 3683 | 24115 | aₛₛₛcₛaₛcaacUGAuGaggc | 3829 | NFkB-747 CHz-7 allyl stab1 |
| | | | | cguuaggccGaaIgccacuB | | |
| 807 | GUCUCCAUGOAGO | 3684 | 24116 | gₛcₛuₛgₛcacUGAuGaggcc | 3830 | NFKB-807 CHz-6 allyl stab1 |
| | | | | guuaggccGaalgagacB | | |
| 847 | GUGAGCCCAUGGA | 3685 | 24117 | uₛcₛcₛaₛugcUGAuGaggcc | 3831 | NFKB-847 CHz-6 allyl stab1 |
| | | | | guuaggccGaaIcucacB | | |
| 864 | CAGUACCUGOCAG | 3686 | 24118 | cₛuₛgₛgₛcacUGAuGaggccg | 3832 | NFKB-864 cHz-6 allyl stab1 |
| | | | | uuaggcCGaaIUaCUgB | | |
| 864 | CCAGUACCUGCCAGA | 3687 | 24119 | uₛcₛuₛgₛgcacUGAuGaggcc | 3833 | NFKB-864 CHz-7 allyl stab1 |
| | | | | guuaggccGaaIuacuggB | | |
| 914 | AAGGACAUAUGAG | 3688 | 24120 | cₛuₛcₛaₛuacUGAuGaggccg | 3834 | NFKB-914 CHz-6 allyl stab1 |
| | | | | uuaggccGaaIuccuuB | | |
| 914 | AAAGGACAUAUGAGA | 3689 | 24121 | uₛcₛuₛcₛauacUGAuGaggcc | 3835 | NFKB-914 CHz-7 allyl stab1 |
| | | | | guuaggccGaaIuccuuuB | | |
| 1023 | UCUGUCCCCAAGC | 3690 | 24122 | gₛcₛuₛuₛggcUGAuGaggccg | 3836 | NFKB-1023 CHz-6 allyl stab1 |
| | | | | uuaggccGaaIacagaB | | |
| 1024 | CUGUCCCCAAGCC | 3691 | 24123 | gₛgₛoₛuₛugcUGAUGaggccg | 3837 | NFKB-1024 CHz-6 allyl stab1 |
| | | | | uuaggccGaaIgacagB | | |
| 1024 | UCUGUCCCCAAGCCA | 3692 | 24124 | uₛgₛgₛcₛuugcUGAuGaggcc | 3838 | NFKB-1024 CHz-7 allyl stab1 |
| | | | | guuaggccGaaIgacagaB | | |
| 1071 | AGCACCAUCAACU | 3693 | 24125 | aₛgₛuₛuₛgacUGAuGaggccg | 3839 | NFKB-1071 CHz-6 allyl stab1 |
| | | | | uuaggccGaaIgugcuB | | |
| 1347 | GAAGACCUGGGGG | 3694 | 24126 | cₛcₛcₛcₛcacUGAuGaggccg | 3840 | NFKB-1347 CHz-6 allyl stab1 |
| | | | | uuaggccGaaIucuucB | | |
| 1347 | UGAAGACCUGGGGGC | 3695 | 24127 | gₛcₛcₛcₛccacUGAuGaggcc | 3841 | NFKB-1347 CHz-7 allyl stab1 |
| | | | | guuaggccGaaIucuucaB | | |
| 1371 | AACAGCACAGACC | 3696 | 24128 | gₛgₛuₛcₛugcUGAuGaggccg | 3842 | NFKB-1371 CHz-6 allyl stab1 |
| | | | | uuaggccGaaIcuguuB | | |
| 1371 | CAACAGCACAGACCC | 3697 | 24129 | gₛgₛgₛuₛCugCUGAUGaggcc | 3843 | NFKB-1371 CHz-7 allyl stab1 |
| | | | | guuaggccGaaIcuguugB | | |
| 1373 | CAGCACAGACCCA | 3698 | 24130 | uₛgₛgₛgₛuccUGAuGaggccg | 3844 | NFKB-1373 CHz-6 allyl stab1 |
| | | | | uuaggccGaaIugcugB | | |
| 1373 | ACAGCACAGACCCAG | 3699 | 24131 | cₛuₛgₛgₛguccUGAuGaggcc | 3845 | NFKB-1373 CHz-7 allyl stab1 |
| | | | | guuaggccGaaIugcuguB | | |
| 1389 | GUGUUCACAGACC | 3700 | 24132 | gₛgₛuₛcₛugcUGAUGaggccg | 3846 | NFKB-1389 CHz-6 allyl stab1 |
| | | | | uuaggccGaaIaacacB | | |
| 1391 | GUUCACAGACCUG | 3701 | 24133 | cₛaₛgₛgₛuccUGALIGaggcc | 3847 | NFKB-1391 CHz-6 allyl stab1 |
| | | | | guuaggccGaaIugaacB | | |
| 1391 | UGUUCACAGACCUGG | 3702 | 24134 | cₛcₛaₛgₛguccUGAuGaggcc | 3848 | NFKB-1391 CHz-7 allyl stab1 |
| | | | | guuaggccGaaIugaacaB | | |
| 1395 | ACAGACCUGGCAU | 3703 | 24135 | aₛuₛgₛcₛcacUGAuGaggccg | 3849 | NFKB-1395 CHz-6 allyl stab1 |
| | | | | uuaggccGaaIucuguB | | |
| 1395 | CACAGACCUGGCAUC | 3704 | 24136 | gₛaₛuₛgₛccacUGAuGaggcc | 3850 | NFKB-1395 CHz-7 allyl stab1 |
| | | | | guuaggccGaaIucugugB | | |
| 1396 | CAGACCUGGCAUC | 3705 | 24137 | gₛaₛuₛgₛcccUGAuGaggccg | 3851 | NFKB-1396 CHz-6 allyl stab1 |
| | | | | uuaggccGaaIgucugB | | |
| 1601 | ACUUCUCCUCCAUUG | 3706 | 24138 | cₛaₛaₛuₛggacUGAuGaggcc | 3852 | NFKB-1 601 CHz-7 allyl stab1 |
| | | | | guuaggccGaaIagaaguB | | |
| 1602 | CUUCUCCUCCAUUGC | 3707 | 24139 | gₛoₛaₛaₛuggcUGAuGaggcc | 3853 | NFKB-1602 CHz-7 allyl stab1 |
| | | | | guuaggccGaalgagaagB | | |
| 1604 | UCUCCUCCAUUGCGG | 3708 | 24140 | cₛcₛgₛcₛaaucUGAuGaggcc | 3854 | NFKB-1604 CHz-7 allyl stab1 |
| | | | | guuaggccGaalaggagaB | | |
| 1605 | UCCUCCAUUGCGG | 3709 | 24141 | cₛcₛgₛcₛaacUGAuGaggccg | 3855 | NFKB-1605 CHz-6 allyl stab1 |
| | | | | uuaggccGaalgaggaB | | |
| 1614 | GCGGACAUGGACU | 3710 | 24142 | aₛgₛuₛcₛcacUGAuGaggccg | 3856 | NFKB-1614 CHz-6 allyl stab1 |
| | | | | uuaggccGaaIuccgcB | | |
| 1614 | UGCGGACAUGGACUU | 3711 | 24143 | aₛaₛgₛuₛccacUGAuGaggcc | 3857 | NFKB-1614 CHz-7 allyl stab1 |
| | | | | guuaggccGaaIuccgcaB | | |
| 1644 | CAGAUCAGCUCCU | 3712 | 24144 | aₛgₛgₛaₛgccUGAUGaggccg | 3858 | NFKB-1644 CHz-6 allyl stab1 |
| | | | | uuaggccGaaIaucugB | | |
| 1644 | UCAGAUCAGCUCCUA | 3713 | 24145 | uₛaₛgₛgₛagCcUGALIGaggc | 3859 | NFKB-1644 CHz-7 allyl stab1 |
| | | | | cguuaggccGaaIaucugaB | | |
| 2382 | UUGGACUCUUGCU | 3714 | 24146 | aₛgₛcₛaₛagcUGAuGaggccg | 3860 | NFKB-2382 CHz-6 allyl stab1 |
| | | | | uuaggccGaaluccaaB | | |
| 2384 | GGACUCUUGCUCU | 3715 | 24147 | aₛgₛaₛgₛcacUGAuGaggccg | 3861 | NFKB-2384 CHz-6 allyl stab1 |
| | | | | uuaggccGaaIaguccB | | |
| 2384 | UGGACUCUUGCUCUU | 3716 | 24148 | aₛaₛgₛaₛgcacUGAuGaggcc | 3862 | NFKB-2384 CHz-7 allyl stab1 |
| | | | | guuaggccGaaIaguccaB | | |
| 2388 | UCUUGOUCUUUCU | 3717 | 24149 | aₛgₛaₛaₛagcUGAuGaggccg | 3863 | NFKB-2388 CHz-6 allyl stab1 |
| | | | | uuaggccGaaIcaagaB | | |
| 2388 | CUCUUGCUCUUUCUA | 3718 | 24150 | uₛaₛgₛaₛaagcUGAuGaggcc | 3864 | NFKB-2388 CHz-7 allyl stab1 |
| | | | | guuaggccGaalcaagagB | | |
| Control | CUAUGCUACGGCA | 3719 | 24151 | uₛgₛcₛcₛgucUAGuGacgcc | 3865 | NFKB-Ctrl CHz-6 allyl (SAC) |
| | | | | guuaggCgGaaIGauagB | | |
| Control | AUGCUCCCGGGUCAA | 3720 | 24152 | uₛuₛgₛaₛccccUAGuGacgc | 3866 | NFKB-Ctrl CHz-7 allyl (SAC) |
| | | | | cguuaggcgGaaIgagcauB | | |
| 193 | AUCAAUGGCUACACA | 3721 | 24184 | uₛgₛuₛgₛuaggccgaaa | 3867 | NFKB-193 Zin.Rz-7 amino |
| | | | | ggCgagugaGguCucauugauB | | |
| 358 | UCOAGUGUGUGAA | 3722 | 24185 | uₛuₛcₛaₛcagccgaaa | 3868 | NFKB-358 Zin.Rz-6 amino |
| | | | | ggCgagUgaGguCuacuggaB | | |
| 358 | AUCCAGUGUGUGAAG | 3723 | 24186 | cₛuₛuₛcₛacagccgaaa | 3869 | NFKB-358 Zin.Rz-7 amino |
| | | | | ggCgagugaGguCuacuggauB | | |
| 360 | CCAGUGUGUGAAGAA | 3724 | 24187 | uₛuₛcₛuₛucagccgaaa | 3870 | NFKB-360 Zin.Rz-7 amino |
| | | | | ggCgagugaGguCuacacuggB | | |
| 486 | UUCCAGGUGACAG | 3725 | 24188 | cₛuₛgₛuₛcagccgaaa | 3871 | NFKB-486 Zin.Rz-6 amino |
| | | | | ggCgagugaGguCucuggaaB | | |
| 486 | cuuCCAGGUGACAGU | 3726 | 24189 | aₛcₛuₛgₛucagccgaaa | 3872 | NFKB-486 Zin.Rz-7 amino |
| | | | | ggCgagugaGguCucuggaagB | | |
| 492 | GUGACAGUGCGGG | 3727 | 24190 | cₛcₛcₛgₛcagccgaaa | 3873 | NFKB-492 Zin.Rz-6 amino |
| | | | | ggCgagugaGguCuugucacB | | |
| 492 | GGUGACAGUGCGGGA | 3728 | 24191 | uₛcₛcₛcₛgcagccgaaa | 3874 | NFKB-492 Zin.Rz-7 amino |
| | | | | ggCgagugaGguCuugucaccB | | |
| 494 | GACAGUGCGGGAC | 3729 | 24192 | gₛuₛcₛcₛcggccgaaa | 3875 | NFKB-494 Zin.Rz-6 amino |
| | | | | ggCgagugaGguCuacugucB | | |
| 494 | UGACAGUGCGGGACC | 3730 | 24193 | gₛgₛuₛcₛccggccgaaa | 3876 | NFKB-494 Zin.Rz-7 amino |
| | | | | ggCgagugaGguCuacugucaB | | |
| 573 | AACACUGCCGAGC | 3731 | 24194 | gₛcₛuₛcₛgggccgaaag | 3877 | NFKB-573 Zin.Rz-6 amino |
| | | | | ggCgagugaGguCuagugggB | | |
| 573 | CAACACUGCCGAGCU | 3732 | 24195 | aₛgₛcₛuₛcgggccgaaa | 3878 | NFKB-573 Zin.Rz-7 amino |
| | | | | ggCgagugaGguguaguguugB | | |
| 578 | UGCCGAGCUCAAG | 3733 | 24196 | cₛuₛuₛgₛaggccgaaa | 3879 | NFKB-578 Zin.Rz-6 amino |
| | | | | ggCgagugaGguCuucggcaB | | |
| 578 | CUGCCGAGCUCAAGA | 3734 | 24197 | uₛcₛuₛuₛgaggccgaaa | 3880 | NFKB-578 Zin.Rz-7 amino |
| | | | | ggCgagugaGguCuucggcagB | | |
| 654 | GACAAGGUGCAGA | 3735 | 24198 | uₛcₛuₛgₛcagccgaaa | 3881 | NFKB-654 Zin.Rz-6 amino |
| | | | | CgggagugaGguCucuugucB | | |
| 656 | ACAAGGUGCAGAAAG | 3736 | 24199 | cₛuₛuₛuₛcuggccgaaa | 3882 | NFKB-656 Zin.Rz-7 amino |
| | | | | ggCgagugaGguCuaccuuguB | | |
| 677 | UGAGGUGUAUUUC | 3737 | 24200 | gₛaₛaₛaₛuagccgaaa | 3883 | NFKB-677 Zin.Rz-6 amino |
| | | | | ggCgagugaGguCuaccucaB | | |
| 750 | GCCAUUGUGUUCC | 3738 | 24201 | gₛgₛaₛaₛcagccgaaa | 3884 | NFKB-750 Zin.Rz-6 amino |
| | | | | ggCgagugaGguCuaauggcB | | |
| 750 | GGCCAUUGUGUUCCG | 3739 | 24202 | cₛgₛgₛaₛacagccgaaa | 3885 | NFKB-750 Zin.Rz-7 amino |
| | | | | ggCgagugaGguCuaauggccB | | |
| 752 | CCAUUGUGUUCCGGA | 3740 | 24203 | uₛcₛcₛgₛgaagccgaaa | 3886 | NFKB-752 Zin.Rz-7 amino |
| | | | | ggCgagugaGguCuaCaauggB | | |
| 1475 | GCCCAUGCUGAUG | 3741 | 24204 | cₛaₛuₛcₛaggccgaaa | 3887 | NFKB-1 475 Zin.Rz-6 amino |
| | | | | ggCgagugaGguCuaugggcB | | |
| 1645 | CAGAUCAGCUCCUAA 3742 | 24205 | uₛuₛaₛgₛgaggccgaaa | 3888 | NFKB-1 645 Zin.Rz-7 amino | |
| | | | | ggCgagugaGguCuugaucugB | | |
| 2386 | ACUCUUGCUCUUU | 3743 | 24206 | aₛaₛaₛgₛaggccgaaa | 3889 | NFKB-2386 Zin.Rz-6 amino |
| | | | | ggCgagugaGguCuaagaguB | | |
| 2386 | GACUCUUGCUCUUUC 3744 | 24207 | gₛaₛaₛaₛgaggccgaaa | 3890 | NFKB-2386 Zin.Rz-7 amino | |
| | | | | ggCgagugaGguCuaagagucB | | |
| Control | UCCGACGCGAAUU | 3745 | 24208 | aₛaₛuₛuₛcggccgaaa | 3891 | NFKB-ctrl Zin. Rz-6 (SAC) |
| | | | | ggCuCugGagugaggucggaB | | |
| Control | ACAUGACGUCCGUGC | 3746 | 24209 | gₛcₛaₛcₛggagccgaaa | 3892 | NFKB-ctrl Zin.Rz-7 (SAC) |
| | | | | ggCuCugGagugaggucauguB | | |
| 269 | ACGAGCUUGUAGGAA | 3747 | 24367 | uuccuaccUGAUGAggc | 3893 | NFKB-269 Rz-7 Ome stab1 |
| | | | | cguuaggccGAAAgcucguB | | |
| 536 | CUGUCCUUUCUCAUC | 3748 | 24368 | gaugagaoUGAUGAggc | 3894 | NFKB-536 Rz-7 Ome stab1 |
| | | | | cguuaggcoGAAAggacagB | | |
| 671 | AGGACAUUGAGGUGU | 3749 | 24369 | acaccuccUGAUGAggc | 3895 | NFKB-671 Rz-7 Ome stab1 |
| | | | | cguuaggccGAAAuguccuB | | |
| 951 | GAGUCCUUUCAGCGG | 3750 | 24370 | ccgcugacUGAUGAggcc | 3896 | NFKB-951 Rz-7 Ome stab1 |
| | | | | guuaggccGAAAggacucB | | |
| 2391 | UUGCUCUUUCUACUC | 3751 | 24371 | gaguagacUGAUGAggccg | 3897 | NFKB-2391 Rz-7 Ome stab1 |
| | | | | uuaggccGAAAgagcaaB | | |
| 327 | CCGCUGCAUCCACAG | 3752 | 24372 | cuguggacUGAUGAggccg | 3898 | NFKB-327 CHz-7 Ome stab1 |
| | | | | uuaggccGAAIcagcggB | | |
| 535 | CCUGUCCUUUCUCAU | 3753 | 24373 | augagaacUGAUGAggccg | 3899 | NFKB-535 CHz-7 Ome stab1 |
| | | | | uuaggccGMIgacaggB | | |
| 1062 | GUCAUCOCUGAGOAC | 3754 | 24374 | gugcucacUGAuGAggccg | 3900 | NFKB-1062 CHz-7 Ome stab1 |
| | | | | uuaggccGpAIgaugacB | | |
| 1114 | UCUGGGCAGAUCAGC | 3755 | 24375 | gcugauccUGAUGAggccg | 3901 | NFKB-1114 CHz-7 Ome stab1 |
| | | | | uuaggccGMIcccagaB | | |
| 1231 | CCUGUCCCAGUCCUA | 3756 | 24376 | uaggacucUGAUGAggccg | 3902 | NFKB-1231 CHz-7 Ome stab1 |
| | | | | uuaggccGMIgacaggB | | |
| 325 | GACCGCUGCAUCCAC | 3757 | 24377 | guggauggccgaaaggC | 3903 | NFKB-325 Zin.Rz-7 amino |
| | | | | gagugaGGuCuagcggucB | | |
| 368 | UGAAGAAGCGGGAcC | 3758 | 24378 | ggucocggccgaaaggC | 3904 | NFKB-368 Zin.Rz-7 amino |
| | | | | gagugaGGuCuuucuucaB | | |
| 799 | CCUGUGCGUGUCUCC | 3759 | 24379 | ggagacagccgaaaggC | 3905 | NFKB-799 Zin.Rz-7 amino |
| | | | | gagugaGGuCugcacaggB | | |
| 801 | UGUGCGUGUCUCCAU | 3760 | 24380 | auggagagccgaaaggC | 3906 | NFKB-801 Zin.Rz-7 amino |
| | | | | gagugaGGuCuacgcacaB | | |
| 1233 | UGUCCCAGUCCUAGC | 3761 | 24381 | gcuaggagccgaaaggC | 3907 | NFKB-1233 Zin.Rz-7 amino |
| | | | | gagugaGGuCuugggacaB | | |
| 157 | AGCACAGAUACCACC | 3762 | 24382 | ggugguaGGcTAGcTAc | 3908 | NFKB-1 57 Dz-7 |
| | | | | AAcGAcugugcuB | | |
| 190 | AAGAUCAAUGGCUAC | 3763 | 24383 | guagccaGGcTAGcTAc | 3909 | NFKB-1 90 Dz-7 |
| | | | | AAcGAugaucuuB | | |
| 399 | UCAGCGCAUCCAGAC | 3764 | 24384 | gucuggaGGcTAGcTAc | 3910 | NFKB-399 Dz-7 |
| | | | | AAcGAgcgcugaB | | |
| 799 | CCUGUGCGUGUCUCC | 3759 | 24385 | ggagacaGGcTAGcTAc | 3911 | NFKB-799 Dz-7 |
| | | | | AAcGAgcacaggB | | |
| 1614 | UGCGGACAUGGACUU | 3711 | 24386 | aaGUccaGGcTAGcTAc | 3912 | NFKB-1614 Dz-7 |
| | | | | AAcGAgUccgcaB | | |
| 156 | GAGCACAGAUACCAC | 3765 | 24387 | gugguauGgaggaaacucCCUUCaa | 3913 | NFKB-156 Amb.Rz-7 |
| | | | | ggacaucgucCGGGugugcucB | | |
| 896 | GGAUUGAGGAGAAAC | 3766 | 24388 | guuucucGgaggaaacucCCUUCaa | 3914 | NFKB-896 Amb.Rz-7 |
| | | | | ggacaucgucCGGGucaauccB | | |
| 1341 | UGAUGAUGAAGACCU | 3767 | 24389 | aggucuuGgaggaaacucCCUUCaa | 3915 | NFKB-1 341 Amb.Rz-7 |
| | | | | ggacaucgucCGGGaucaucaB | | |
| 2314 | AGAGUGGGGGAGAGC | 3768 | 24390 | gcucuccGgaggaaacucCCUUCaa | 3916 | NFKB-2314 Amb.Rz-7 |
| | | | | ggacaucgucCGGGccacucuB | | |
| 2318 | UGGGGGAGAGCAGGC | 3769 | 24391 | gccugcuGgaggaaacucCCUUCaa | 3917 | NFKB-2318 Amb.Rz-7 |
| | | | | ggacaucgucCGGGucccccaB | | |

A, G, C, U = Ribo
A, G, C, T (italic) = deoxy
lower case = 2′-O-methyl
s = phosphorothioate 3′-internucleotide linkage
U = 2′-deoxy-2′-C-allyl uridine
U = 2′-deoxy-2′-Amino uridine
C = 2′-deoxy-2′-Amino cytidine
I = Inosine
B = inverted deoxyabasic derivative

What we claim is:

1. An enzymatic nucleic acid molecule which down regulates expression of a sequence encoding a subunit of NFKB, wherein said enzymatic nucleic acid molecule is in an Inozyme, Zinzyme, G-cleaver, or Amberzyme configuration.

2. An enzymatic nucleic acid molecule comprising a sequence selected from the group consisting of SEQ ID NOs. 711-1420, 1717-2012, 2151-2656, 2994-3626, and 3770-3917.

3. An enzymatic nucleic acid molecule comprising at least one binding arm wherein one or more of said binding arms comprises a sequence complementary to a sequence selected from the group consisting of SEQ ID NOs. 1-30, 32-48, 50-108, 100-136, 138-183, 185-306, 308-450, 452-497, 499-710, 1421-1428, 1430-1454, 1456-1464, 1466-1475, 1477-1482, 1484-1501, 1504-1535, 1537-1543, 1545-1548, 1550-1563, 1565-1575, 1578-1586, 1588-1601, 1603-1607, 1609-1716, 2013-2015, 2017-2056, 2058-2064, 2066-2076, 2078-2082, 2084, 2086-2150, 2657-2993, and 3627-3769.

4. An antisense nucleic acid molecule comprising a sequence complementary to a sequence selected from the group consisting of SEQ ID NOs. 1-710, 1421-1716, 2013-2150, 2657-2993, and 3627-3769.

5. The enzymatic nucleic acid of any of claims 1-3, wherein said enzymatic nucleic acid molecule is adapted to treat cancer.

6. The antisense nucleic acid molecule of claim 4, wherein said antisense nucleic acid molecule is adapted to treat cancer.

7. The enzymatic nucleic acid molecule of any of claims 1-3, wherein said enzymatic nucleic acid molecule has an endonuclease activity to cleave RNA having REL-A sequence.

8. The enzymatic nucleic acid molecule of claim 1, wherein said enzymatic nucleic acid molecule is in an Inozyme configuration.

9. The enzymatic nucleic acid molecule of claim 1, wherein said enzymatic nucleic acid molecule is in a Zinzyme configuration.

10. The enzymatic nucleic acid molecule of claim 1, wherein said enzymatic nucleic acid molecule is in a G-cleaver configuration.

11. The enzymatic nucleic acid molecule of claim 1, wherein said enzymatic nucleic acid molecule is in an Amberzyme configuration.

12. The enzymatic nucleic acid molecule of claim 3, wherein said enzymatic nucleic acid molecule is in a DNAzyme configuration.

13. The enzymatic nucleic acid molecule of claim 8, wherein said Inozyme comprises a sequence complementary to a sequence selected from the group consisting of SEQ ID NOs. 1-710, 3752-3756, and 3660-3720.

14. The enzymatic nucleic acid molecule of claim 8, wherein said Inozyme comprises a sequence selected from the group consisting of SEQ ID NOs. 711-1420, 3898-3902, and 3806-3866.

15. The enzymatic nucleic acid molecule of claim 9, wherein said Zinzyme comprises a sequence complementary to a sequence selected from the group consisting of SEQ ID NOs. 1421-1716, 3721-3746, and 3757-3761.

16. The enzymatic nucleic acid molecule of claim 9, wherein said Zinzyme comprises a sequence selected from the group consisting of SEQ ID NOs 1717-2012, 3867-3892, and 3903-3907.

17. The enzymatic nucleic acid molecule of claim 11, wherein said Amberzyme comprises a sequence complementary to a sequence selected from the group consisting of SEQ ID NOs. 1421-1716, 2657-2993, and 3765-3769.

18. The enzymatic nucleic acid molecule of claim 11, wherein said Amberzyme comprises a sequence selected from the group consisting of SEQ ID NOs 2994-3626, and 3913-3917.

19. The enzymatic nucleic acid molecule of any of claims 1-3, wherein said enzymatic nucleic acid molecule comprises between 12 and 100 bases complementary to RNA sequence encoding a subunit of NFKB.

20. The enzymatic nucleic acid molecule of any of claims 1-3, wherein said enzymatic nucleic acid molecule comprises between 14 and 24 bases complementary to RNA sequence encoding a subunit of NFKB.

21. The enzymatic nucleic acid molecule of any of claims 1-3, wherein said enzymatic nucleic acid molecule is chemically synthesized.

22. The antisense nucleic acid molecule of claim 4, wherein said antisense nucleic acid molecule is chemically synthesized.

23. The enzymatic nucleic acid molecule of any of claims 1-3, wherein said enzymatic nucleic acid molecule comprises at least one 2′-sugar modification.

24. The antisense nucleic acid molecule of claim 4, wherein said antisense nucleic acid molecule comprises at least one 2′-sugar modification.

25. The enzymatic nucleic acid molecule of any of claims 1-3, wherein said enzymatic nucleic acid molecule comprises at least one nucleic acid base modification.

26. The antisense nucleic acid molecule of claim 4, wherein said antisense nucleic acid molecule comprises at least one nucleic acid base modification.

27. The enzymatic nucleic acid molecule of any of claims 1-3, wherein said enzymatic nucleic acid molecule comprises at least one phosphate backbone modification.

28. The antisense nucleic acid molecule of claim 4, wherein said antisense nucleic acid molecule comprises at least one phosphate backbone modification.

29. A mammalian cell including the enzymatic nucleic acid molecule of any of claims 1-3.

30. The mammalian cell of claim 29, wherein said mammalian cell is a human cell.

31. A method of down-regulating REL-A activity in a cell, comprising contacting said cell with the enzymatic nucleic acid molecule of any of claims 1-3, under conditions suitable for down-regulating of REL-A activity.

32. A method of down-regulating REL-A activity in a cell, comprising contacting said cell with the antisense nucleic acid molecule of claim 4 under conditions suitable for said reduction of REL-A activity.

33. A method of treatment of a patient having a condition associated with the level of REL-A, comprising contacting cells of said patient with the enzymatic nucleic acid molecule of any of claims 1-3, under conditions suitable for said treatment.

34. A method of treatment of a patient having a condition associated with the level of REL-A, comprising contacting cells of said patient with the antisense nucleic acid molecule of claim 4, under conditions suitable for said treatment.

35. The method of claim 31 further comprising the use of one or more drug therapies under conditions suitable for said treatment.

36. The method of claim 32 further comprising the use of one or more drug therapies under conditions suitable for said treatment.

37. The method of claim 33 further comprising the use of one or more drug therapies under conditions suitable for said treatment.

38. The method of claim 34 further comprising the use of one or more drug therapies under conditions suitable for said treatment.

39. A method of cleaving RNA comprising a sequence of REL-A gene comprising contacting an enzymatic nucleic acid molecule of any of claims 1-3 with said RNA of REL-A gene under conditions suitable for the cleavage.

40. The method of claim 39, wherein said cleavage is carried out in the presence of a divalent cation.

41. The method of claim 40, wherein said divalent cation is Mg²⁺.

42. The enzymatic nucleic acid molecule of any of claims 1-3, wherein said enzymatic nucleic acid comprises a cap structure, wherein the cap structure is at the 5′-end, or 3′-end, or both the 5′-end and the 3′-end.

43. The antisense nucleic acid molecule of claim 4, wherein said antisense nucleic acid comprises a cap structure, wherein the cap structure is at the 5′-end, or 3′-end, or both the 5′-end and the 3′-end.

44. The enzymatic nucleic acid molecule of claim 42, wherein the cap structure at the 5′-end, 3′-end, or both the 5′-end and the 3′-end comprises a 3′,3′-linked or 5′,5′-linked deoxyabasic ribose derivative.

45. The antisense nucleic acid molecule of claim 43, wherein the cap structure at the 5′-end, 3′-end, or both the 5′-end and the 3′-end comprises a 3′,3′-linked or 5′,5′-linked deoxyabasic ribose derivative.

46. The method of claim 31, wherein said enzymatic nucleic acid molecule is in a Zinzyme configuration.

47. An expression vector comprising a nucleic acid sequence encoding at least one enzymatic nucleic acid molecule of claim 1 or claim 3 in a manner which allows expression of the nucleic acid molecule.

48. A mammalian cell including an expression vector of claim 47.

49. The mammalian cell of claim 48, wherein said mammalian cell is a human cell.

50. The expression vector of claim 47, wherein said enzymatic nucleic acid molecule is in a hammerhead configuration.

51. The expression vector of claim 47, wherein said expression vector further comprises a sequence for an antisense nucleic acid molecule complementary to the RNA of a subunit of NFKB.

52. The expression vector of claim 47, wherein said expression vector comprises a nucleic acid sequence encoding two or more of said enzymatic nucleic acid molecules, which may be the same or different.

53. The expression vector of claim 52, wherein said expression vector further comprises a sequence encoding an antisense nucleic acid molecule complementary to the RNA of REL-A gene.

54. A method for treatment of cancer comprising administering to a patient the enzymatic nucleic acid molecule of any of claims 1-3 under conditions suitable for said treatment.

55. The method of claim 54, wherein said cancer is breast cancer, lung cancer, prostate cancer, colorectal cancer, brain cancer, esophageal cancer, stomach cancer, bladder cancer, pancreatic cancer, cervical cancer, head and neck cancer, ovarian cancer, melanoma, lymphoma, glioma, or multidrug resistant cancer.

56. A method for treatment of cancer comprising administering to a patient the antisense nucleic acid molecule of claim 4 under conditions suitable for said treatment.

57. The method of claim 56, wherein said cancer is breast cancer, lung cancer, prostate cancer, colorectal cancer, brain cancer, esophageal cancer, stomach cancer, bladder cancer, pancreatic cancer, cervical cancer, head and neck cancer, ovarian cancer, melanoma, lymphoma, glioma, or multidrug resistant cancer.

58. The method of claim 54, wherein said enzymatic nucleic acid molecule is in a Zinzyme configuration.

59. The method of claim 54, wherein said method further comprises administering to said patient one or more other therapies.

60. The method of claim 56, wherein said method further comprises administering to said patient one or more other therapies.

61. The nucleic acid molecule of claim 1 or claim 3, wherein said nucleic acid molecule comprises at least five ribose residues, at least ten 2′-O-methyl modifications, and a 3′-end modification.

62. The nucleic acid molecule of claim 61, wherein said nucleic acid molecule further comprises phosphorothioate linkages on at least three of the 5′ terminal nucleotides.

63. The nucleic acid molecule of claim 61, wherein said 3′-end modification is a 3′-3′ inverted abasic moiety.

64. The method of claim 35 wherein said other drug therapies are monoclonal antibodies, REL-A-specific inhibitors, or chemotherapy, or radiation therapy.

65. The method of claim 64, wherein said chemotherapy is paclitaxel, docetaxel, cisplatin, methotrexate, cyclophosphamide, doxorubin, fluorouracil carboplatin, edatrexate, gemcitabine, or vinorelbine.

66. The method of claim 36 wherein said other drug therapies are monoclonal antibodies, REL-A-specific inhibitors, or chemotherapy, or radiation therapy.

67. The method of claim 66, wherein said chemotherapy is paclitaxel, docetaxel, cisplatin, methotrexate, cyclophosphamide, doxorubin, fluorouracil carboplatin, edatrexate, gemcitabine, or vinorelbine.

68. The method of claim 37 wherein said other drug therapies are monoclonal antibodies, REL-A-specific inhibitors, or chemotherapy, or radiation therapy.

69. The method of claim 68, wherein said chemotherapy is paclitaxel, docetaxel, cisplatin, methotrexate, cyclophosphamide, doxorubin, fluorouracil carboplatin, edatrexate, gemcitabine, or vinorelbine.

70. The method of claim 38 wherein said other drug therapies are monoclonal antibodies, REL-A-specific inhibitors, or chemotherapy, or radiation therapy.

71. The method of claim 70, wherein said chemotherapy is paclitaxel, docetaxel, cisplatin, methotrexate, cyclophosphamide, doxorubin, fluorouracil carboplatin, edatrexate, gemcitabine, or vinorelbine.

72. The method of claim 59, wherein said other therapies are monoclonal antibodies, REL-A-specific inhibitors, chemotherapy, or radiation therapy.

73. The method of claim 72, wherein said chemotherapy is paclitaxel, docetaxel, cisplatin, methotrexate, cyclophosphamide, doxorubin, fluorouracil carboplatin, edatrexate, gemcitabine, or vinorelbine.

74. The method of claim 60, wherein said other therapies are monoclonal antibodies, REL-A-specific inhibitors, chemotherapy, or radiation therapy.

75. The method of claim 74, wherein said chemotherapy is paclitaxel, docetaxel, cisplatin, methotrexate, cyclophosphamide, doxorubin, fluorouracil carboplatin, edatrexate, gemcitabine, or vinorelbine.

76. A method for treatment of an inflammatory disease comprising the step of administering to a patient the enzymatic nucleic acid molecule of any of claims 1-3 under conditions suitable for said treatment.

77. The method of claim 76, wherein said inflammatory disease is rheumatoid arthritis, restenosis, asthma, Crohn's disease, diabetes, obesity, autoimmune disease, lupus, multiple sclerosis, transplant/graft rejection, gene therapy applications, ischemia/reperfusion injury, glomerulonephritis, sepsis, allergic airway inflammation, inflammatory bowel disease, or infection.

78. A method for treatment of an inflammatory disease comprising the step of administering to a patient the antisense nucleic acid molecule of claim 4 under conditions suitable for said treatment.

79. The method of claim 78, wherein said inflammatory disease is rheumatoid arthritis, restenosis, asthma, Crohn's disease, diabetes, obesity, autoimmune disease, lupus, multiple sclerosis, transplant/graft rejection, gene therapy applications, ischemia/reperfusion injury (CNS and myocardial), glomerulonephritis, sepsis, allergic airway inflammation, inflammatory bowel disease, or infection.

80. The method of claim 76, wherein said enzymatic nucleic acid molecule is in a Zinzyme configuration.

81. The method of claim 76, wherein said method further comprises administering to said patient one or more other therapies.

82. The method of claim 78, wherein said method further comprises administering to said patient one or more other therapies.

83. A pharmaceutical composition comprising an enzymatic nucleic acid molecule of any of claims 1-3 in a pharmaceutically acceptable carrier.

84. A pharmaceutical composition comprising an antisense nucleic acid molecule of claim 4 in a pharmaceutically acceptable carrier.

85. The enzymatic nucleic acid molecule of claim 1, wherein said subunit of NFKB is REL-A.

86. The enzymatic nucleic acid molecule of claim 1, wherein said subunit of NFKB is REL-B.

87. The enzymatic nucleic acid molecule of claim 1, wherein said subunit of NFKB is REL.

88. The enzymatic nucleic acid molecule of claim 1, wherein said subunit of NFKB is NFKB1.

89. The enzymatic nucleic acid molecule of claim 1, wherein said subunit of NFKB is NFKB2.

90. The enzymatic nucleic acid molecule of claim 20, wherein said subunit of NFKB is REL-A.

91. The enzymatic nucleic acid molecule of claim 20, wherein said subunit of NFKB is REL-B.

92. The enzymatic nucleic acid molecule of claim 20, wherein said subunit of NFKB is REL.

93. The enzymatic nucleic acid molecule of claim 20, wherein said subunit of NFKB is NFKB1.

94. The enzymatic nucleic acid molecule of claim 20, wherein said subunit of NFKB is NFKB2.

The application's sequence listing, which the Patent Office published only in electronic form, follows.

SEQUENCE LISTING (3929 sequences)

SEQ ID NO: 1 - RNA, 17 nt, Artificial Sequence
  Description of Artificial Sequence:  Nucleic Acid
ggcggggccgggucgca

SEQ ID NO: 2 - RNA, 17 nt, Artificial Sequence
  Description of Artificial Sequence:  Nucleic Acid
cgggucgcagcugggcc

SEQ ID NO: 3 - RNA, 17 nt, Artificial Sequence
  Description of Artificial Sequence:  Nucleic Acid
gucgcagcugggcccgc

SEQ ID NO: 4 - RNA, 17 nt, Artificial Sequence
  Description of Artificial Sequence:  Nucleic Acid
agcugggcccgcggcau

SEQ ID NO: 5 - RNA, 17 nt, Artificial Sequence
  Description of Artificial Sequence:  Nucleic Acid
gcugggcccgcggcaug

SEQ ID NO: 6 - RNA, 17 nt, Artificial Sequence
  Description of Artificial Sequence:  Nucleic Acid
cccgcggcauggacgaa

SEQ ID NO: 7 - RNA, 17 nt, Artificial Sequence
  Description of Artificial Sequence:  Nucleic Acid
ggacgaacuguuccccc

SEQ ID NO: 8 - RNA, 17 nt, Artificial Sequence
  Description of Artificial Sequence:  Nucleic Acid
aacuguucccccucauc

SEQ ID NO: 9 - RNA, 17 nt, Artificial Sequence
  Description of Artificial Sequence:  Nucleic Acid
acuguucccccucaucu

SEQ ID NO: 10 - RNA, 17 nt, Artificial Sequence
  Description of Artificial Sequence:  Nucleic Acid
cuguucccccucaucuu

SEQ ID NO: 11 - RNA, 17 nt, Artificial Sequence
  Description of Artificial Sequence:  Nucleic Acid
uguucccccucaucuuc

SEQ ID NO: 12 - RNA, 17 nt, Artificial Sequence
  Description of Artificial Sequence:  Nucleic Acid
guucccccucaucuucc

SEQ ID NO: 13 - RNA, 17 nt, Artificial Sequence
  Description of Artificial Sequence:  Nucleic Acid
ucccccucaucuucccg

SEQ ID NO: 14 - RNA, 17 nt, Artificial Sequence
  Description of Artificial Sequence:  Nucleic Acid
cccucaucuucccggca

SEQ ID NO: 15 - RNA, 17 nt, Artificial Sequence
  Description of Artificial Sequence:  Nucleic Acid
ucaucuucccggcagag

SEQ ID NO: 16 - RNA, 17 nt, Artificial Sequence
  Description of Artificial Sequence:  Nucleic Acid
caucuucccggcagagc

SEQ ID NO: 17 - RNA, 17 nt, Artificial Sequence
  Description of Artificial Sequence:  Nucleic Acid
uucccggcagagcagcc

SEQ ID NO: 18 - RNA, 17 nt, Artificial Sequence
  Description of Artificial Sequence:  Nucleic Acid
ggcagagcagcccaagc

SEQ ID NO: 19 - RNA, 17 nt, Artificial Sequence
  Description of Artificial Sequence:  Nucleic Acid
agagcagcccaagcagc

SEQ ID NO: 20 - RNA, 17 nt, Artificial Sequence
  Description of Artificial Sequence:  Nucleic Acid
gagcagcccaagcagcg

SEQ ID NO: 21 - RNA, 17 nt, Artificial Sequence
  Description of Artificial Sequence:  Nucleic Acid
agcagcccaagcagcgg

SEQ ID NO: 22 - RNA, 17 nt, Artificial Sequence
  Description of Artificial Sequence:  Nucleic Acid
gcccaagcagcggggca

SEQ ID NO: 23 - RNA, 17 nt, Artificial Sequence
  Description of Artificial Sequence:  Nucleic Acid
agcggggcaugcgcuuc

SEQ ID NO: 24 - RNA, 17 nt, Artificial Sequence
  Description of Artificial Sequence:  Nucleic Acid
gcaugcgcuuccgcuac

SEQ ID NO: 25 - RNA, 17 nt, Artificial Sequence
  Description of Artificial Sequence:  Nucleic Acid
ugcgcuuccgcuacaag

SEQ ID NO: 26 - RNA, 17 nt, Artificial Sequence
  Description of Artificial Sequence:  Nucleic Acid
gcuuccgcuacaagugc

SEQ ID NO: 27 - RNA, 17 nt, Artificial Sequence
  Description of Artificial Sequence:  Nucleic Acid
uccgcuacaagugcgag

SEQ ID NO: 28 - RNA, 17 nt, Artificial Sequence
  Description of Artificial Sequence:  Nucleic Acid
aggggcgcuccgcgggc

SEQ ID NO: 29 - RNA, 17 nt, Artificial Sequence
  Description of Artificial Sequence:  Nucleic Acid
gggcgcuccgcgggcag

SEQ ID NO: 30 - RNA, 17 nt, Artificial Sequence
  Description of Artificial Sequence:  Nucleic Acid
ccgcgggcagcauccca

SEQ ID NO: 31 - RNA, 17 nt, Artificial Sequence
  Description of Artificial Sequence:  Nucleic Acid
cgggcagcaucccaggc

SEQ ID NO: 32 - RNA, 17 nt, Artificial Sequence
  Description of Artificial Sequence:  Nucleic Acid
gcagcaucccaggcgag

SEQ ID NO: 33 - RNA, 17 nt, Artificial Sequence
  Description of Artificial Sequence:  Nucleic Acid
cagcaucccaggcgaga

SEQ ID NO: 34 - RNA, 17 nt, Artificial Sequence
  Description of Artificial Sequence:  Nucleic Acid
agcaucccaggcgagag

SEQ ID NO: 35 - RNA, 17 nt, Artificial Sequence
  Description of Artificial Sequence:  Nucleic Acid
agaggagcacagauacc

SEQ ID NO: 36 - RNA, 17 nt, Artificial Sequence
  Description of Artificial Sequence:  Nucleic Acid
aggagcacagauaccac

SEQ ID NO: 37 - RNA, 17 nt, Artificial Sequence
  Description of Artificial Sequence:  Nucleic Acid
acagauaccaccaagac

SEQ ID NO: 38 - RNA, 17 nt, Artificial Sequence
  Description of Artificial Sequence:  Nucleic Acid
cagauaccaccaagacc

SEQ ID NO: 39 - RNA, 17 nt, Artificial Sequence
  Description of Artificial Sequence:  Nucleic Acid
gauaccaccaagaccca

SEQ ID NO: 40 - RNA, 17 nt, Artificial Sequence
  Description of Artificial Sequence:  Nucleic Acid
auaccaccaagacccac

SEQ ID NO: 41 - RNA, 17 nt, Artificial Sequence
  Description of Artificial Sequence:  Nucleic Acid
accaagacccaccccac

SEQ ID NO: 42 - RNA, 17 nt, Artificial Sequence
  Description of Artificial Sequence:  Nucleic Acid
ccaagacccaccccacc

SEQ ID NO: 43 - RNA, 17 nt, Artificial Sequence
  Description of Artificial Sequence:  Nucleic Acid
caagacccaccccacca

SEQ ID NO: 44 - RNA, 17 nt, Artificial Sequence
  Description of Artificial Sequence:  Nucleic Acid
agacccaccccaccauc

SEQ ID NO: 45 - RNA, 17 nt, Artificial Sequence
  Description of Artificial Sequence:  Nucleic Acid
gacccaccccaccauca

SEQ ID NO: 46 - RNA, 17 nt, Artificial Sequence
  Description of Artificial Sequence:  Nucleic Acid
acccaccccaccaucaa

SEQ ID NO: 47 - RNA, 17 nt, Artificial Sequence
  Description of Artificial Sequence:  Nucleic Acid
cccaccccaccaucaag

SEQ ID NO: 48 - RNA, 17 nt, Artificial Sequence
  Description of Artificial Sequence:  Nucleic Acid
caccccaccaucaagau

SEQ ID NO: 49 - RNA, 17 nt, Artificial Sequence
  Description of Artificial Sequence:  Nucleic Acid
accccaccaucaagauc

SEQ ID NO: 50 - RNA, 17 nt, Artificial Sequence
  Description of Artificial Sequence:  Nucleic Acid
ccaccaucaagaucaau

SEQ ID NO: 51 - RNA, 17 nt, Artificial Sequence
  Description of Artificial Sequence:  Nucleic Acid
ucaagaucaauggcuac

SEQ ID NO: 52 - RNA, 17 nt, Artificial Sequence
  Description of Artificial Sequence:  Nucleic Acid
ucaauggcuacacagga

SEQ ID NO: 53 - RNA, 17 nt, Artificial Sequence
  Description of Artificial Sequence:  Nucleic Acid
auggcuacacaggacca

SEQ ID NO: 54 - RNA, 17 nt, Artificial Sequence
  Description of Artificial Sequence:  Nucleic Acid
ggcuacacaggaccagg

SEQ ID NO: 55 - RNA, 17 nt, Artificial Sequence
  Description of Artificial Sequence:  Nucleic Acid
cacaggaccagggacag

SEQ ID NO: 56 - RNA, 17 nt, Artificial Sequence
  Description of Artificial Sequence:  Nucleic Acid
acaggaccagggacagu

SEQ ID NO: 57 - RNA, 17 nt, Artificial Sequence
  Description of Artificial Sequence:  Nucleic Acid
ccagggacagugcgcau

SEQ ID NO: 58 - RNA, 17 nt, Artificial Sequence
  Description of Artificial Sequence:  Nucleic Acid
cagugcgcaucucccug

SEQ ID NO: 59 - RNA, 17 nt, Artificial Sequence
  Description of Artificial Sequence:  Nucleic Acid
ugcgcaucucccugguc

SEQ ID NO: 60 - RNA, 17 nt, Artificial Sequence
  Description of Artificial Sequence:  Nucleic Acid
cgcaucucccuggucac

SEQ ID NO: 61 - RNA, 17 nt, Artificial Sequence
  Description of Artificial Sequence:  Nucleic Acid
gcaucucccuggucacc

SEQ ID NO: 62 - RNA, 17 nt, Artificial Sequence
  Description of Artificial Sequence:  Nucleic Acid
caucucccuggucacca

SEQ ID NO: 63 - RNA, 17 nt, Artificial Sequence
  Description of Artificial Sequence:  Nucleic Acid
cccuggucaccaaggac

SEQ ID NO: 64 - RNA, 17 nt, Artificial Sequence
  Description of Artificial Sequence:  Nucleic Acid
cuggucaccaaggaccc

SEQ ID NO: 65 - RNA, 17 nt, Artificial Sequence
  Description of Artificial Sequence:  Nucleic Acid
uggucaccaaggacccu

SEQ ID NO: 66 - RNA, 17 nt, Artificial Sequence
  Description of Artificial Sequence:  Nucleic Acid
ccaaggacccuccucac

SEQ ID NO: 67 - RNA, 17 nt, Artificial Sequence
  Description of Artificial Sequence:  Nucleic Acid
caaggacccuccucacc

SEQ ID NO: 68 - RNA, 17 nt, Artificial Sequence
  Description of Artificial Sequence:  Nucleic Acid
aaggacccuccucaccg

SEQ ID NO: 69 - RNA, 17 nt, Artificial Sequence
  Description of Artificial Sequence:  Nucleic Acid
ggacccuccucaccggc

SEQ ID NO: 70 - RNA, 17 nt, Artificial Sequence
  Description of Artificial Sequence:  Nucleic Acid
gacccuccucaccggcc

SEQ ID NO: 71 - RNA, 17 nt, Artificial Sequence
  Description of Artificial Sequence:  Nucleic Acid
cccuccucaccggccuc

SEQ ID NO: 72 - RNA, 17 nt, Artificial Sequence
  Description of Artificial Sequence:  Nucleic Acid
cuccucaccggccucac

SEQ ID NO: 73 - RNA, 17 nt, Artificial Sequence
  Description of Artificial Sequence:  Nucleic Acid
ucaccggccucaccccc

SEQ ID NO: 74 - RNA, 17 nt, Artificial Sequence
  Description of Artificial Sequence:  Nucleic Acid
caccggccucaccccca

SEQ ID NO: 75 - RNA, 17 nt, Artificial Sequence
  Description of Artificial Sequence:  Nucleic Acid
ccggccucacccccacg

SEQ ID NO: 76 - RNA, 17 nt, Artificial Sequence
  Description of Artificial Sequence:  Nucleic Acid
ggccucacccccacgag

SEQ ID NO: 77 - RNA, 17 nt, Artificial Sequence
  Description of Artificial Sequence:  Nucleic Acid
gccucacccccacgagc

SEQ ID NO: 78 - RNA, 17 nt, Artificial Sequence
  Description of Artificial Sequence:  Nucleic Acid
ccucacccccacgagcu

SEQ ID NO: 79 - RNA, 17 nt, Artificial Sequence
  Description of Artificial Sequence:  Nucleic Acid
cucacccccacgagcuu

SEQ ID NO: 80 - RNA, 17 nt, Artificial Sequence
  Description of Artificial Sequence:  Nucleic Acid
ucacccccacgagcuug

SEQ ID NO: 81 - RNA, 17 nt, Artificial Sequence
  Description of Artificial Sequence:  Nucleic Acid
ccacgagcuuguaggaa

SEQ ID NO: 82 - RNA, 17 nt, Artificial Sequence
  Description of Artificial Sequence:  Nucleic Acid
gaaaggacugccgggau

SEQ ID NO: 83 - RNA, 17 nt, Artificial Sequence
  Description of Artificial Sequence:  Nucleic Acid
aggacugccgggauggc

SEQ ID NO: 84 - RNA, 17 nt, Artificial Sequence
  Description of Artificial Sequence:  Nucleic Acid
gggauggcuucuaugag

SEQ ID NO: 85 - RNA, 17 nt, Artificial Sequence
  Description of Artificial Sequence:  Nucleic Acid
auggcuucuaugaggcu

SEQ ID NO: 86 - RNA, 17 nt, Artificial Sequence
  Description of Artificial Sequence:  Nucleic Acid
uaugaggcugagcucug

SEQ ID NO: 87 - RNA, 17 nt, Artificial Sequence
  Description of Artificial Sequence:  Nucleic Acid
ggcugagcucugcccgg

SEQ ID NO: 88 - RNA, 17 nt, Artificial Sequence
  Description of Artificial Sequence:  Nucleic Acid
cugagcucugcccggac

SEQ ID NO: 89 - RNA, 17 nt, Artificial Sequence
  Description of Artificial Sequence:  Nucleic Acid
agcucugcccggaccgc

SEQ ID NO: 90 - RNA, 17 nt, Artificial Sequence
  Description of Artificial Sequence:  Nucleic Acid
gcucugcccggaccgcu

SEQ ID NO: 91 - RNA, 17 nt, Artificial Sequence
  Description of Artificial Sequence:  Nucleic Acid
gcccggaccgcugcauc

SEQ ID NO: 92 - RNA, 17 nt, Artificial Sequence
  Description of Artificial Sequence:  Nucleic Acid
cggaccgcugcauccac

SEQ ID NO: 93 - RNA, 17 nt, Artificial Sequence
  Description of Artificial Sequence:  Nucleic Acid
accgcugcauccacagu

SEQ ID NO: 94 - RNA, 17 nt, Artificial Sequence
  Description of Artificial Sequence:  Nucleic Acid
gcugcauccacaguuuc

SEQ ID NO: 95 - RNA, 17 nt, Artificial Sequence
  Description of Artificial Sequence:  Nucleic Acid
cugcauccacaguuucc

SEQ ID NO: 96 - RNA, 17 nt, Artificial Sequence
  Description of Artificial Sequence:  Nucleic Acid
gcauccacaguuuccag

SEQ ID NO: 97 - RNA, 17 nt, Artificial Sequence
  Description of Artificial Sequence:  Nucleic Acid
acaguuuccagaaccug

SEQ ID NO: 98 - RNA, 17 nt, Artificial Sequence
  Description of Artificial Sequence:  Nucleic Acid
caguuuccagaaccugg

SEQ ID NO: 99 - RNA, 17 nt, Artificial Sequence
  Description of Artificial Sequence:  Nucleic Acid
uccagaaccugggaauc

SEQ ID NO: 100 - RNA, 17 nt, Artificial Sequence
  Description of Artificial Sequence:  Nucleic Acid
ccagaaccugggaaucc

SEQ ID NO: 101 - RNA, 17 nt, Artificial Sequence
  Description of Artificial Sequence:  Nucleic Acid
ugggaauccagugugug

SEQ ID NO: 102 - RNA, 17 nt, Artificial Sequence
  Description of Artificial Sequence:  Nucleic Acid
gggaauccaguguguga

SEQ ID NO: 103 - RNA, 17 nt, Artificial Sequence
  Description of Artificial Sequence:  Nucleic Acid
agcgggaccuggagcag

SEQ ID NO: 104 - RNA, 17 nt, Artificial Sequence
  Description of Artificial Sequence:  Nucleic Acid
gcgggaccuggagcagg

SEQ ID NO: 105 - RNA, 17 nt, Artificial Sequence
  Description of Artificial Sequence:  Nucleic Acid
ccuggagcaggcuauca

SEQ ID NO: 106 - RNA, 17 nt, Artificial Sequence
  Description of Artificial Sequence:  Nucleic Acid
gagcaggcuaucaguca

SEQ ID NO: 107 - RNA, 17 nt, Artificial Sequence
  Description of Artificial Sequence:  Nucleic Acid
aggcuaucagucagcgc

SEQ ID NO: 108 - RNA, 17 nt, Artificial Sequence
  Description of Artificial Sequence:  Nucleic Acid
uaucagucagcgcaucc

SEQ ID NO: 109 - RNA, 17 nt, Artificial Sequence
  Description of Artificial Sequence:  Nucleic Acid
gucagcgcauccagacc

SEQ ID NO: 110 - RNA, 17 nt, Artificial Sequence
  Description of Artificial Sequence:  Nucleic Acid
agcgcauccagaccaac

SEQ ID NO: 111 - RNA, 17 nt, Artificial Sequence
  Description of Artificial Sequence:  Nucleic Acid
gcgcauccagaccaaca

SEQ ID NO: 112 - RNA, 17 nt, Artificial Sequence
  Description of Artificial Sequence:  Nucleic Acid
auccagaccaacaacaa

SEQ ID NO: 113 - RNA, 17 nt, Artificial Sequence
  Description of Artificial Sequence:  Nucleic Acid
uccagaccaacaacaac

SEQ ID NO: 114 - RNA, 17 nt, Artificial Sequence
  Description of Artificial Sequence:  Nucleic Acid
agaccaacaacaacccc

SEQ ID NO: 115 - RNA, 17 nt, Artificial Sequence
  Description of Artificial Sequence:  Nucleic Acid
ccaacaacaaccccuuc

SEQ ID NO: 116 - RNA, 17 nt, Artificial Sequence
  Description of Artificial Sequence:  Nucleic Acid
acaacaaccccuuccaa

SEQ ID NO: 117 - RNA, 17 nt, Artificial Sequence
  Description of Artificial Sequence:  Nucleic Acid
caacaaccccuuccaag

SEQ ID NO: 118 - RNA, 17 nt, Artificial Sequence
  Description of Artificial Sequence:  Nucleic Acid
aacaaccccuuccaagu

SEQ ID NO: 119 - RNA, 17 nt, Artificial Sequence
  Description of Artificial Sequence:  Nucleic Acid
acaaccccuuccaaguu

SEQ ID NO: 120 - RNA, 17 nt, Artificial Sequence
  Description of Artificial Sequence:  Nucleic Acid
accccuuccaaguuccu

SEQ ID NO: 121 - RNA, 17 nt, Artificial Sequence
  Description of Artificial Sequence:  Nucleic Acid
ccccuuccaaguuccua

SEQ ID NO: 122 - RNA, 17 nt, Artificial Sequence
  Description of Artificial Sequence:  Nucleic Acid
ccaaguuccuauagaag

SEQ ID NO: 123 - RNA, 17 nt, Artificial Sequence
  Description of Artificial Sequence:  Nucleic Acid
caaguuccuauagaaga

SEQ ID NO: 124 - RNA, 17 nt, Artificial Sequence
  Description of Artificial Sequence:  Nucleic Acid
agaagagcagcgugggg

SEQ ID NO: 125 - RNA, 17 nt, Artificial Sequence
  Description of Artificial Sequence:  Nucleic Acid
guggggacuacgaccug

SEQ ID NO: 126 - RNA, 17 nt, Artificial Sequence
  Description of Artificial Sequence:  Nucleic Acid
acuacgaccugaaugcu

SEQ ID NO: 127 - RNA, 17 nt, Artificial Sequence
  Description of Artificial Sequence:  Nucleic Acid
cuacgaccugaaugcug

SEQ ID NO: 128 - RNA, 17 nt, Artificial Sequence
  Description of Artificial Sequence:  Nucleic Acid
cugaaugcugugcggcu

SEQ ID NO: 129 - RNA, 17 nt, Artificial Sequence
  Description of Artificial Sequence:  Nucleic Acid
ugugcggcucugcuucc

SEQ ID NO: 130 - RNA, 17 nt, Artificial Sequence
  Description of Artificial Sequence:  Nucleic Acid
ugcggcucugcuuccag

SEQ ID NO: 131 - RNA, 17 nt, Artificial Sequence
  Description of Artificial Sequence:  Nucleic Acid
ggcucugcuuccaggug

SEQ ID NO: 132 - RNA, 17 nt, Artificial Sequence
  Description of Artificial Sequence:  Nucleic Acid
ucugcuuccaggugaca

SEQ ID NO: 133 - RNA, 17 nt, Artificial Sequence
  Description of Artificial Sequence:  Nucleic Acid
cugcuuccaggugacag

SEQ ID NO: 134 - RNA, 17 nt, Artificial Sequence
  Description of Artificial Sequence:  Nucleic Acid
caggugacagugcggga

SEQ ID NO: 135 - RNA, 17 nt, Artificial Sequence
  Description of Artificial Sequence:  Nucleic Acid
ugcgggacccaucaggc

SEQ ID NO: 136 - RNA, 17 nt, Artificial Sequence
  Description of Artificial Sequence:  Nucleic Acid
gcgggacccaucaggca

SEQ ID NO: 137 - RNA, 17 nt, Artificial Sequence
  Description of Artificial Sequence:  Nucleic Acid
cgggacccaucaggcag

SEQ ID NO: 138 - RNA, 17 nt, Artificial Sequence
  Description of Artificial Sequence:  Nucleic Acid
gacccaucaggcaggcc

SEQ ID NO: 139 - RNA, 17 nt, Artificial Sequence
  Description of Artificial Sequence:  Nucleic Acid
caucaggcaggccccuc

SEQ ID NO: 140 - RNA, 17 nt, Artificial Sequence
  Description of Artificial Sequence:  Nucleic Acid
aggcaggccccuccgcc

SEQ ID NO: 141 - RNA, 17 nt, Artificial Sequence
  Description of Artificial Sequence:  Nucleic Acid
ggcaggccccuccgccu

SEQ ID NO: 142 - RNA, 17 nt, Artificial Sequence
  Description of Artificial Sequence:  Nucleic Acid
gcaggccccuccgccug

SEQ ID NO: 143 - RNA, 17 nt, Artificial Sequence
  Description of Artificial Sequence:  Nucleic Acid
caggccccuccgccugc

SEQ ID NO: 144 - RNA, 17 nt, Artificial Sequence
  Description of Artificial Sequence:  Nucleic Acid
ggccccuccgccugccg

SEQ ID NO: 145 - RNA, 17 nt, Artificial Sequence
  Description of Artificial Sequence:  Nucleic Acid
cccuccgccugccgccu

SEQ ID NO: 146 - RNA, 17 nt, Artificial Sequence
  Description of Artificial Sequence:  Nucleic Acid
ccuccgccugccgccug

SEQ ID NO: 147 - RNA, 17 nt, Artificial Sequence
  Description of Artificial Sequence:  Nucleic Acid
ccgccugccgccugucc

SEQ ID NO: 148 - RNA, 17 nt, Artificial Sequence
  Description of Artificial Sequence:  Nucleic Acid
ccugccgccuguccuuu

SEQ ID NO: 149 - RNA, 17 nt, Artificial Sequence
  Description of Artificial Sequence:  Nucleic Acid
cugccgccuguccuuuc

SEQ ID NO: 150 - RNA, 17 nt, Artificial Sequence
  Description of Artificial Sequence:  Nucleic Acid
cgccuguccuuucucau

SEQ ID NO: 151 - RNA, 17 nt, Artificial Sequence
  Description of Artificial Sequence:  Nucleic Acid
gccuguccuuucucauc

SEQ ID NO: 152 - RNA, 17 nt, Artificial Sequence
  Description of Artificial Sequence:  Nucleic Acid
guccuuucucaucccau

SEQ ID NO: 153 - RNA, 17 nt, Artificial Sequence
  Description of Artificial Sequence:  Nucleic Acid
ccuuucucaucccaucu

SEQ ID NO: 154 - RNA, 17 nt, Artificial Sequence
  Description of Artificial Sequence:  Nucleic Acid
uucucaucccaucuuug

SEQ ID NO: 155 - RNA, 17 nt, Artificial Sequence
  Description of Artificial Sequence:  Nucleic Acid
ucucaucccaucuuuga

SEQ ID NO: 156 - RNA, 17 nt, Artificial Sequence
  Description of Artificial Sequence:  Nucleic Acid
cucaucccaucuuugac

SEQ ID NO: 157 - RNA, 17 nt, Artificial Sequence
  Description of Artificial Sequence:  Nucleic Acid
aucccaucuuugacaau

SEQ ID NO: 158 - RNA, 17 nt, Artificial Sequence
  Description of Artificial Sequence:  Nucleic Acid
ucuuugacaaucgugcc

SEQ ID NO: 159 - RNA, 17 nt, Artificial Sequence
  Description of Artificial Sequence:  Nucleic Acid
aaucgugcccccaacac

SEQ ID NO: 160 - RNA, 17 nt, Artificial Sequence
  Description of Artificial Sequence:  Nucleic Acid
aucgugcccccaacacu

SEQ ID NO: 161 - RNA, 17 nt, Artificial Sequence
  Description of Artificial Sequence:  Nucleic Acid
ucgugcccccaacacug

SEQ ID NO: 162 - RNA, 17 nt, Artificial Sequence
  Description of Artificial Sequence:  Nucleic Acid
cgugcccccaacacugc

SEQ ID NO: 163 - RNA, 17 nt, Artificial Sequence
  Description of Artificial Sequence:  Nucleic Acid
gugcccccaacacugcc

SEQ ID NO: 164 - RNA, 17 nt, Artificial Sequence
  Description of Artificial Sequence:  Nucleic Acid
cccccaacacugccgag

SEQ ID NO: 165 - RNA, 17 nt, Artificial Sequence
  Description of Artificial Sequence:  Nucleic Acid
cccaacacugccgagcu

SEQ ID NO: 166 - RNA, 17 nt, Artificial Sequence
  Description of Artificial Sequence:  Nucleic Acid
aacacugccgagcucaa

SEQ ID NO: 167 - RNA, 17 nt, Artificial Sequence
  Description of Artificial Sequence:  Nucleic Acid
ugccgagcucaagaucu

SEQ ID NO: 168 - RNA, 17 nt, Artificial Sequence
  Description of Artificial Sequence:  Nucleic Acid
ccgagcucaagaucugc

SEQ ID NO: 169 - RNA, 17 nt, Artificial Sequence
  Description of Artificial Sequence:  Nucleic Acid
ucaagaucugccgagug

SEQ ID NO: 170 - RNA, 17 nt, Artificial Sequence
  Description of Artificial Sequence:  Nucleic Acid
agaucugccgagugaac

SEQ ID NO: 171 - RNA, 17 nt, Artificial Sequence
  Description of Artificial Sequence:  Nucleic Acid
gagugaaccgaaacucu

SEQ ID NO: 172 - RNA, 17 nt, Artificial Sequence
  Description of Artificial Sequence:  Nucleic Acid
accgaaacucuggcagc

SEQ ID NO: 173 - RNA, 17 nt, Artificial Sequence
  Description of Artificial Sequence:  Nucleic Acid
cgaaacucuggcagcug

SEQ ID NO: 174 - RNA, 17 nt, Artificial Sequence
  Description of Artificial Sequence:  Nucleic Acid
acucuggcagcugccuc

SEQ ID NO: 175 - RNA, 17 nt, Artificial Sequence
  Description of Artificial Sequence:  Nucleic Acid
cuggcagcugccucggu

SEQ ID NO: 176 - RNA, 17 nt, Artificial Sequence
  Description of Artificial Sequence:  Nucleic Acid
gcagcugccucgguggg

SEQ ID NO: 177 - RNA, 17 nt, Artificial Sequence
  Description of Artificial Sequence:  Nucleic Acid
cagcugccucggugggg

SEQ ID NO: 178 - RNA, 17 nt, Artificial Sequence
  Description of Artificial Sequence:  Nucleic Acid
augagaucuuccuacug

SEQ ID NO: 179 - RNA, 17 nt, Artificial Sequence
  Description of Artificial Sequence:  Nucleic Acid
agaucuuccuacugugu

SEQ ID NO: 180 - RNA, 17 nt, Artificial Sequence
  Description of Artificial Sequence:  Nucleic Acid
gaucuuccuacugugug

SEQ ID NO: 181 - RNA, 17 nt, Artificial Sequence
  Description of Artificial Sequence:  Nucleic Acid
cuuccuacugugugaca

SEQ ID NO: 182 - RNA, 17 nt, Artificial Sequence
  Description of Artificial Sequence:  Nucleic Acid
ugugugacaaggugcag

SEQ ID NO: 183 - RNA, 17 nt, Artificial Sequence
  Description of Artificial Sequence:  Nucleic Acid
caaggugcagaaagagg

SEQ ID NO: 184 - RNA, 17 nt, Artificial Sequence
  Description of Artificial Sequence:  Nucleic Acid
aagaggacauugaggug

SEQ ID NO: 185 - RNA, 17 nt, Artificial Sequence
  Description of Artificial Sequence:  Nucleic Acid
uguauuucacgggacca

SEQ ID NO: 186 - RNA, 17 nt, Artificial Sequence
  Description of Artificial Sequence:  Nucleic Acid
cacgggaccaggcuggg

SEQ ID NO: 187 - RNA, 17 nt, Artificial Sequence
  Description of Artificial Sequence:  Nucleic Acid
acgggaccaggcuggga

SEQ ID NO: 188 - RNA, 17 nt, Artificial Sequence
  Description of Artificial Sequence:  Nucleic Acid
gaccaggcugggaggcc

SEQ ID NO: 189 - RNA, 17 nt, Artificial Sequence
  Description of Artificial Sequence:  Nucleic Acid
ugggaggcccgaggcuc

SEQ ID NO: 190 - RNA, 17 nt, Artificial Sequence
  Description of Artificial Sequence:  Nucleic Acid
gggaggcccgaggcucc

SEQ ID NO: 191 - RNA, 17 nt, Artificial Sequence
  Description of Artificial Sequence:  Nucleic Acid
cccgaggcuccuuuucg

SEQ ID NO: 192 - RNA, 17 nt, Artificial Sequence
  Description of Artificial Sequence:  Nucleic Acid
cgaggcuccuuuucgca

SEQ ID NO: 193 - RNA, 17 nt, Artificial Sequence
  Description of Artificial Sequence:  Nucleic Acid
gaggcuccuuuucgcaa

SEQ ID NO: 194 - RNA, 17 nt, Artificial Sequence
  Description of Artificial Sequence:  Nucleic Acid
cuuuucgcaagcugaug

SEQ ID NO: 195 - RNA, 17 nt, Artificial Sequence
  Description of Artificial Sequence:  Nucleic Acid
ucgcaagcugaugugca

SEQ ID NO: 196 - RNA, 17 nt, Artificial Sequence
  Description of Artificial Sequence:  Nucleic Acid
ugaugugcaccgacaag

SEQ ID NO: 197 - RNA, 17 nt, Artificial Sequence
  Description of Artificial Sequence:  Nucleic Acid
augugcaccgacaagug

SEQ ID NO: 198 - RNA, 17 nt, Artificial Sequence
  Description of Artificial Sequence:  Nucleic Acid
gcaccgacaaguggcca

SEQ ID NO: 199 - RNA, 17 nt, Artificial Sequence
  Description of Artificial Sequence:  Nucleic Acid
caaguggccauuguguu

SEQ ID NO: 200 - RNA, 17 nt, Artificial Sequence
  Description of Artificial Sequence:  Nucleic Acid
aaguggccauuguguuc

SEQ ID NO: 201 - RNA, 17 nt, Artificial Sequence
  Description of Artificial Sequence:  Nucleic Acid
uuguguuccggaccccu

SEQ ID NO: 202 - RNA, 17 nt, Artificial Sequence
  Description of Artificial Sequence:  Nucleic Acid
uuccggaccccucccua

SEQ ID NO: 203 - RNA, 17 nt, Artificial Sequence
  Description of Artificial Sequence:  Nucleic Acid
uccggaccccucccuac

SEQ ID NO: 204 - RNA, 17 nt, Artificial Sequence
  Description of Artificial Sequence:  Nucleic Acid
ccggaccccucccuacg

SEQ ID NO: 205 - RNA, 17 nt, Artificial Sequence
  Description of Artificial Sequence:  Nucleic Acid
cggaccccucccuacgc

SEQ ID NO: 206 - RNA, 17 nt, Artificial Sequence
  Description of Artificial Sequence:  Nucleic Acid
gaccccucccuacgcag

SEQ ID NO: 207 - RNA, 17 nt, Artificial Sequence
  Description of Artificial Sequence:  Nucleic Acid
accccucccuacgcaga

SEQ ID NO: 208 - RNA, 17 nt, Artificial Sequence
  Description of Artificial Sequence:  Nucleic Acid
ccccucccuacgcagac

SEQ ID NO: 209 - RNA, 17 nt, Artificial Sequence
  Description of Artificial Sequence:  Nucleic Acid
cccuacgcagaccccag

SEQ ID NO: 210 - RNA, 17 nt, Artificial Sequence
  Description of Artificial Sequence:  Nucleic Acid
acgcagaccccagccug

SEQ ID NO: 211 - RNA, 17 nt, Artificial Sequence
  Description of Artificial Sequence:  Nucleic Acid
cgcagaccccagccugc

SEQ ID NO: 212 - RNA, 17 nt, Artificial Sequence
  Description of Artificial Sequence:  Nucleic Acid
gcagaccccagccugca

SEQ ID NO: 213 - RNA, 17 nt, Artificial Sequence
  Description of Artificial Sequence:  Nucleic Acid
cagaccccagccugcag

SEQ ID NO: 214 - RNA, 17 nt, Artificial Sequence
  Description of Artificial Sequence:  Nucleic Acid
accccagccugcaggcu

SEQ ID NO: 215 - RNA, 17 nt, Artificial Sequence
  Description of Artificial Sequence:  Nucleic Acid
ccccagccugcaggcuc

SEQ ID NO: 216 - RNA, 17 nt, Artificial Sequence
  Description of Artificial Sequence:  Nucleic Acid
cagccugcaggcuccug

SEQ ID NO: 217 - RNA, 17 nt, Artificial Sequence
  Description of Artificial Sequence:  Nucleic Acid
cugcaggcuccugugcg

SEQ ID NO: 218 - RNA, 17 nt, Artificial Sequence
  Description of Artificial Sequence:  Nucleic Acid
gcaggcuccugugcgug

SEQ ID NO: 219 - RNA, 17 nt, Artificial Sequence
  Description of Artificial Sequence:  Nucleic Acid
caggcuccugugcgugu

SEQ ID NO: 220 - RNA, 17 nt, Artificial Sequence
  Description of Artificial Sequence:  Nucleic Acid
ugcgugucuccaugcag

SEQ ID NO: 221 - RNA, 17 nt, Artificial Sequence
  Description of Artificial Sequence:  Nucleic Acid
cgugucuccaugcagcu

SEQ ID NO: 222 - RNA, 17 nt, Artificial Sequence
  Description of Artificial Sequence:  Nucleic Acid
gugucuccaugcagcug

SEQ ID NO: 223 - RNA, 17 nt, Artificial Sequence
  Description of Artificial Sequence:  Nucleic Acid
cuccaugcagcugcggc

SEQ ID NO: 224 - RNA, 17 nt, Artificial Sequence
  Description of Artificial Sequence:  Nucleic Acid
caugcagcugcggcggc

SEQ ID NO: 225 - RNA, 17 nt, Artificial Sequence
  Description of Artificial Sequence:  Nucleic Acid
gcggcggccuuccgacc

SEQ ID NO: 226 - RNA, 17 nt, Artificial Sequence
  Description of Artificial Sequence:  Nucleic Acid
cggcggccuuccgaccg

SEQ ID NO: 227 - RNA, 17 nt, Artificial Sequence
  Description of Artificial Sequence:  Nucleic Acid
cggccuuccgaccggga

SEQ ID NO: 228 - RNA, 17 nt, Artificial Sequence
  Description of Artificial Sequence:  Nucleic Acid
cuuccgaccgggagcuc

SEQ ID NO: 229 - RNA, 17 nt, Artificial Sequence
  Description of Artificial Sequence:  Nucleic Acid
ccgggagcucagugagc

SEQ ID NO: 230 - RNA, 17 nt, Artificial Sequence
  Description of Artificial Sequence:  Nucleic Acid
gggagcucagugagccc

SEQ ID NO: 231 - RNA, 17 nt, Artificial Sequence
  Description of Artificial Sequence:  Nucleic Acid
cagugagcccauggaau

SEQ ID NO: 232 - RNA, 17 nt, Artificial Sequence
  Description of Artificial Sequence:  Nucleic Acid
agugagcccauggaauu

SEQ ID NO: 233 - RNA, 17 nt, Artificial Sequence
  Description of Artificial Sequence:  Nucleic Acid
gugagcccauggaauuc

SEQ ID NO: 234 - RNA, 17 nt, Artificial Sequence
  Description of Artificial Sequence:  Nucleic Acid
uggaauuccaguaccug

SEQ ID NO: 235 - RNA, 17 nt, Artificial Sequence
  Description of Artificial Sequence:  Nucleic Acid
ggaauuccaguaccugc

SEQ ID NO: 236 - RNA, 17 nt, Artificial Sequence
  Description of Artificial Sequence:  Nucleic Acid
uccaguaccugccagau

SEQ ID NO: 237 - RNA, 17 nt, Artificial Sequence
  Description of Artificial Sequence:  Nucleic Acid
ccaguaccugccagaua

SEQ ID NO: 238 - RNA, 17 nt, Artificial Sequence
  Description of Artificial Sequence:  Nucleic Acid
guaccugccagauacag

SEQ ID NO: 239 - RNA, 17 nt, Artificial Sequence
  Description of Artificial Sequence:  Nucleic Acid
uaccugccagauacaga

SEQ ID NO: 240 - RNA, 17 nt, Artificial Sequence
  Description of Artificial Sequence:  Nucleic Acid
ccagauacagacgaucg

SEQ ID NO: 241 - RNA, 17 nt, Artificial Sequence
  Description of Artificial Sequence:  Nucleic Acid
cgaucgucaccggauug

SEQ ID NO: 242 - RNA, 17 nt, Artificial Sequence
  Description of Artificial Sequence:  Nucleic Acid
aucgucaccggauugag

SEQ ID NO: 243 - RNA, 17 nt, Artificial Sequence
  Description of Artificial Sequence:  Nucleic Acid
aaaaggacauaugagac

SEQ ID NO: 244 - RNA, 17 nt, Artificial Sequence
  Description of Artificial Sequence:  Nucleic Acid
uaugagaccuucaagag

SEQ ID NO: 245 - RNA, 17 nt, Artificial Sequence
  Description of Artificial Sequence:  Nucleic Acid
augagaccuucaagagc

SEQ ID NO: 246 - RNA, 17 nt, Artificial Sequence
  Description of Artificial Sequence:  Nucleic Acid
agaccuucaagagcauc

SEQ ID NO: 247 - RNA, 17 nt, Artificial Sequence
  Description of Artificial Sequence:  Nucleic Acid
ucaagagcaucaugaag

SEQ ID NO: 248 - RNA, 17 nt, Artificial Sequence
  Description of Artificial Sequence:  Nucleic Acid
agagcaucaugaagaag

SEQ ID NO: 249 - RNA, 17 nt, Artificial Sequence
  Description of Artificial Sequence:  Nucleic Acid
gaagaguccuuucagcg

SEQ ID NO: 250 - RNA, 17 nt, Artificial Sequence
  Description of Artificial Sequence:  Nucleic Acid
aagaguccuuucagcgg

SEQ ID NO: 251 - RNA, 17 nt, Artificial Sequence
  Description of Artificial Sequence:  Nucleic Acid
guccuuucagcggaccc

SEQ ID NO: 252 - RNA, 17 nt, Artificial Sequence
  Description of Artificial Sequence:  Nucleic Acid
cagcggacccaccgacc

SEQ ID NO: 253 - RNA, 17 nt, Artificial Sequence
  Description of Artificial Sequence:  Nucleic Acid
agcggacccaccgaccc

SEQ ID NO: 254 - RNA, 17 nt, Artificial Sequence
  Description of Artificial Sequence:  Nucleic Acid
gcggacccaccgacccc

SEQ ID NO: 255 - RNA, 17 nt, Artificial Sequence
  Description of Artificial Sequence:  Nucleic Acid
ggacccaccgacccccg

SEQ ID NO: 256 - RNA, 17 nt, Artificial Sequence
  Description of Artificial Sequence:  Nucleic Acid
ccaccgacccccggccu

SEQ ID NO: 257 - RNA, 17 nt, Artificial Sequence
  Description of Artificial Sequence:  Nucleic Acid
caccgacccccggccuc

SEQ ID NO: 258 - RNA, 17 nt, Artificial Sequence
  Description of Artificial Sequence:  Nucleic Acid
accgacccccggccucc

SEQ ID NO: 259 - RNA, 17 nt, Artificial Sequence
  Description of Artificial Sequence:  Nucleic Acid
ccgacccccggccucca

SEQ ID NO: 260 - RNA, 17 nt, Artificial Sequence
  Description of Artificial Sequence:  Nucleic Acid
cccccggccuccaccuc

SEQ ID NO: 261 - RNA, 17 nt, Artificial Sequence
  Description of Artificial Sequence:  Nucleic Acid
ccccggccuccaccucg

SEQ ID NO: 262 - RNA, 17 nt, Artificial Sequence
  Description of Artificial Sequence:  Nucleic Acid
ccggccuccaccucgac

SEQ ID NO: 263 - RNA, 17 nt, Artificial Sequence
  Description of Artificial Sequence:  Nucleic Acid
cggccuccaccucgacg

SEQ ID NO: 264 - RNA, 17 nt, Artificial Sequence
  Description of Artificial Sequence:  Nucleic Acid
gccuccaccucgacgca

SEQ ID NO: 265 - RNA, 17 nt, Artificial Sequence
  Description of Artificial Sequence:  Nucleic Acid
ccuccaccucgacgcau

SEQ ID NO: 266 - RNA, 17 nt, Artificial Sequence
  Description of Artificial Sequence:  Nucleic Acid
cucgacgcauugcugug

SEQ ID NO: 267 - RNA, 17 nt, Artificial Sequence
  Description of Artificial Sequence:  Nucleic Acid
cgcauugcugugccuuc

SEQ ID NO: 268 - RNA, 17 nt, Artificial Sequence
  Description of Artificial Sequence:  Nucleic Acid
ugcugugccuucccgca

SEQ ID NO: 269 - RNA, 17 nt, Artificial Sequence
  Description of Artificial Sequence:  Nucleic Acid
gcugugccuucccgcag

SEQ ID NO: 270 - RNA, 17 nt, Artificial Sequence
  Description of Artificial Sequence:  Nucleic Acid
gugccuucccgcagcuc

SEQ ID NO: 271 - RNA, 17 nt, Artificial Sequence
  Description of Artificial Sequence:  Nucleic Acid
ugccuucccgcagcuca

SEQ ID NO: 272 - RNA, 17 nt, Artificial Sequence
  Description of Artificial Sequence:  Nucleic Acid
cuucccgcagcucagcu

SEQ ID NO: 273 - RNA, 17 nt, Artificial Sequence
  Description of Artificial Sequence:  Nucleic Acid
cccgcagcucagcuucu

SEQ ID NO: 274 - RNA, 17 nt, Artificial Sequence
  Description of Artificial Sequence:  Nucleic Acid
cgcagcucagcuucugu

SEQ ID NO: 275 - RNA, 17 nt, Artificial Sequence
  Description of Artificial Sequence:  Nucleic Acid
agcucagcuucuguccc

SEQ ID NO: 276 - RNA, 17 nt, Artificial Sequence
  Description of Artificial Sequence:  Nucleic Acid
ucagcuucuguccccaa

SEQ ID NO: 277 - RNA, 17 nt, Artificial Sequence
  Description of Artificial Sequence:  Nucleic Acid
cuucuguccccaagcca

SEQ ID NO: 278 - RNA, 17 nt, Artificial Sequence
  Description of Artificial Sequence:  Nucleic Acid
uucuguccccaagccag

SEQ ID NO: 279 - RNA, 17 nt, Artificial Sequence
  Description of Artificial Sequence:  Nucleic Acid
ucuguccccaagccagc

SEQ ID NO: 280 - RNA, 17 nt, Artificial Sequence
  Description of Artificial Sequence:  Nucleic Acid
cuguccccaagccagca

SEQ ID NO: 281 - RNA, 17 nt, Artificial Sequence
  Description of Artificial Sequence:  Nucleic Acid
ccccaagccagcacccc

SEQ ID NO: 282 - RNA, 17 nt, Artificial Sequence
  Description of Artificial Sequence:  Nucleic Acid
cccaagccagcacccca

SEQ ID NO: 283 - RNA, 17 nt, Artificial Sequence
  Description of Artificial Sequence:  Nucleic Acid
aagccagcaccccagcc

SEQ ID NO: 284 - RNA, 17 nt, Artificial Sequence
  Description of Artificial Sequence:  Nucleic Acid
gccagcaccccagcccu

SEQ ID NO: 285 - RNA, 17 nt, Artificial Sequence
  Description of Artificial Sequence:  Nucleic Acid
ccagcaccccagcccua

SEQ ID NO: 286 - RNA, 17 nt, Artificial Sequence
  Description of Artificial Sequence:  Nucleic Acid
cagcaccccagcccuau

SEQ ID NO: 287 - RNA, 17 nt, Artificial Sequence
  Description of Artificial Sequence:  Nucleic Acid
agcaccccagcccuauc

SEQ ID NO: 288 - RNA, 17 nt, Artificial Sequence
  Description of Artificial Sequence:  Nucleic Acid
accccagcccuaucccu

SEQ ID NO: 289 - RNA, 17 nt, Artificial Sequence
  Description of Artificial Sequence:  Nucleic Acid
ccccagcccuaucccuu

SEQ ID NO: 290 - RNA, 17 nt, Artificial Sequence
  Description of Artificial Sequence:  Nucleic Acid
cccagcccuaucccuuu

SEQ ID NO: 291 - RNA, 17 nt, Artificial Sequence
  Description of Artificial Sequence:  Nucleic Acid
gcccuaucccuuuacgu

SEQ ID NO: 292 - RNA, 17 nt, Artificial Sequence
  Description of Artificial Sequence:  Nucleic Acid
cccuaucccuuuacguc

SEQ ID NO: 293 - RNA, 17 nt, Artificial Sequence
  Description of Artificial Sequence:  Nucleic Acid
ccuaucccuuuacguca

SEQ ID NO: 294 - RNA, 17 nt, Artificial Sequence
  Description of Artificial Sequence:  Nucleic Acid
uuuacgucaucccugag

SEQ ID NO: 295 - RNA, 17 nt, Artificial Sequence
  Description of Artificial Sequence:  Nucleic Acid
acgucaucccugagcac

SEQ ID NO: 296 - RNA, 17 nt, Artificial Sequence
  Description of Artificial Sequence:  Nucleic Acid
cgucaucccugagcacc

SEQ ID NO: 297 - RNA, 17 nt, Artificial Sequence
  Description of Artificial Sequence:  Nucleic Acid
gucaucccugagcacca

SEQ ID NO: 298 - RNA, 17 nt, Artificial Sequence
  Description of Artificial Sequence:  Nucleic Acid
cccugagcaccaucaac

SEQ ID NO: 299 - RNA, 17 nt, Artificial Sequence
  Description of Artificial Sequence:  Nucleic Acid
cugagcaccaucaacua

SEQ ID NO: 300 - RNA, 17 nt, Artificial Sequence
  Description of Artificial Sequence:  Nucleic Acid
ugagcaccaucaacuau

SEQ ID NO: 301 - RNA, 17 nt, Artificial Sequence
  Description of Artificial Sequence:  Nucleic Acid
gcaccaucaacuaugau

SEQ ID NO: 302 - RNA, 17 nt, Artificial Sequence
  Description of Artificial Sequence:  Nucleic Acid
ccaucaacuaugaugag

SEQ ID NO: 303 - RNA, 17 nt, Artificial Sequence
  Description of Artificial Sequence:  Nucleic Acid
ugaguuucccaccaugg

SEQ ID NO: 304 - RNA, 17 nt, Artificial Sequence
  Description of Artificial Sequence:  Nucleic Acid
gaguuucccaccauggu

SEQ ID NO: 305 - RNA, 17 nt, Artificial Sequence
  Description of Artificial Sequence:  Nucleic Acid
aguuucccaccauggug

SEQ ID NO: 306 - RNA, 17 nt, Artificial Sequence
  Description of Artificial Sequence:  Nucleic Acid
uuucccaccaugguguu

SEQ ID NO: 307 - RNA, 17 nt, Artificial Sequence
  Description of Artificial Sequence:  Nucleic Acid
uucccaccaugguguuu

SEQ ID NO: 308 - RNA, 17 nt, Artificial Sequence
  Description of Artificial Sequence:  Nucleic Acid
gguguuuccuucugggc

SEQ ID NO: 309 - RNA, 17 nt, Artificial Sequence
  Description of Artificial Sequence:  Nucleic Acid
guguuuccuucugggca

SEQ ID NO: 310 - RNA, 17 nt, Artificial Sequence
  Description of Artificial Sequence:  Nucleic Acid
uuuccuucugggcagau

SEQ ID NO: 311 - RNA, 17 nt, Artificial Sequence
  Description of Artificial Sequence:  Nucleic Acid
uucugggcagaucagcc

SEQ ID NO: 312 - RNA, 17 nt, Artificial Sequence
  Description of Artificial Sequence:  Nucleic Acid
ggcagaucagccaggcc

SEQ ID NO: 313 - RNA, 17 nt, Artificial Sequence
  Description of Artificial Sequence:  Nucleic Acid
agaucagccaggccucg

SEQ ID NO: 314 - RNA, 17 nt, Artificial Sequence
  Description of Artificial Sequence:  Nucleic Acid
gaucagccaggccucgg

SEQ ID NO: 315 - RNA, 17 nt, Artificial Sequence
  Description of Artificial Sequence:  Nucleic Acid
agccaggccucggccuu

SEQ ID NO: 316 - RNA, 17 nt, Artificial Sequence
  Description of Artificial Sequence:  Nucleic Acid
gccaggccucggccuug

SEQ ID NO: 317 - RNA, 17 nt, Artificial Sequence
  Description of Artificial Sequence:  Nucleic Acid
gccucggccuuggcccc

SEQ ID NO: 318 - RNA, 17 nt, Artificial Sequence
  Description of Artificial Sequence:  Nucleic Acid
ccucggccuuggccccg

SEQ ID NO: 319 - RNA, 17 nt, Artificial Sequence
  Description of Artificial Sequence:  Nucleic Acid
gccuuggccccggcccc

SEQ ID NO: 320 - RNA, 17 nt, Artificial Sequence
  Description of Artificial Sequence:  Nucleic Acid
ccuuggccccggccccu

SEQ ID NO: 321 - RNA, 17 nt, Artificial Sequence
  Description of Artificial Sequence:  Nucleic Acid
cuuggccccggccccuc

SEQ ID NO: 322 - RNA, 17 nt, Artificial Sequence
  Description of Artificial Sequence:  Nucleic Acid
gccccggccccucccca

SEQ ID NO: 323 - RNA, 17 nt, Artificial Sequence
  Description of Artificial Sequence:  Nucleic Acid
ccccggccccuccccaa

SEQ ID NO: 324 - RNA, 17 nt, Artificial Sequence
  Description of Artificial Sequence:  Nucleic Acid
cccggccccuccccaag

SEQ ID NO: 325 - RNA, 17 nt, Artificial Sequence
  Description of Artificial Sequence:  Nucleic Acid
ccggccccuccccaagu

SEQ ID NO: 326 - RNA, 17 nt, Artificial Sequence
  Description of Artificial Sequence:  Nucleic Acid
ggccccuccccaagucc

SEQ ID NO: 327 - RNA, 17 nt, Artificial Sequence
  Description of Artificial Sequence:  Nucleic Acid
gccccuccccaaguccu

SEQ ID NO: 328 - RNA, 17 nt, Artificial Sequence
  Description of Artificial Sequence:  Nucleic Acid
ccccuccccaaguccug

SEQ ID NO: 329 - RNA, 17 nt, Artificial Sequence
  Description of Artificial Sequence:  Nucleic Acid
cccuccccaaguccugc

SEQ ID NO: 330 - RNA, 17 nt, Artificial Sequence
  Description of Artificial Sequence:  Nucleic Acid
cccaaguccugccccag

SEQ ID NO: 331 - RNA, 17 nt, Artificial Sequence
  Description of Artificial Sequence:  Nucleic Acid
ccaaguccugccccagg

SEQ ID NO: 332 - RNA, 17 nt, Artificial Sequence
  Description of Artificial Sequence:  Nucleic Acid
aguccugccccaggcuc

SEQ ID NO: 333 - RNA, 17 nt, Artificial Sequence
  Description of Artificial Sequence:  Nucleic Acid
guccugccccaggcucc

SEQ ID NO: 334 - RNA, 17 nt, Artificial Sequence
  Description of Artificial Sequence:  Nucleic Acid
uccugccccaggcucca

SEQ ID NO: 335 - RNA, 17 nt, Artificial Sequence
  Description of Artificial Sequence:  Nucleic Acid
ccugccccaggcuccag

SEQ ID NO: 336 - RNA, 17 nt, Artificial Sequence
  Description of Artificial Sequence:  Nucleic Acid
ccccaggcuccagcccc

SEQ ID NO: 337 - RNA, 17 nt, Artificial Sequence
  Description of Artificial Sequence:  Nucleic Acid
ccaggcuccagccccug

SEQ ID NO: 338 - RNA, 17 nt, Artificial Sequence
  Description of Artificial Sequence:  Nucleic Acid
caggcuccagccccugc

SEQ ID NO: 339 - RNA, 17 nt, Artificial Sequence
  Description of Artificial Sequence:  Nucleic Acid
gcuccagccccugcccc

SEQ ID NO: 340 - RNA, 17 nt, Artificial Sequence
  Description of Artificial Sequence:  Nucleic Acid
cuccagccccugccccu

SEQ ID NO: 341 - RNA, 17 nt, Artificial Sequence
  Description of Artificial Sequence:  Nucleic Acid
uccagccccugccccug

SEQ ID NO: 342 - RNA, 17 nt, Artificial Sequence
  Description of Artificial Sequence:  Nucleic Acid
ccagccccugccccugc

SEQ ID NO: 343 - RNA, 17 nt, Artificial Sequence
  Description of Artificial Sequence:  Nucleic Acid
gccccugccccugcucc

SEQ ID NO: 344 - RNA, 17 nt, Artificial Sequence
  Description of Artificial Sequence:  Nucleic Acid
ccccugccccugcucca

SEQ ID NO: 345 - RNA, 17 nt, Artificial Sequence
  Description of Artificial Sequence:  Nucleic Acid
cccugccccugcuccag

SEQ ID NO: 346 - RNA, 17 nt, Artificial Sequence
  Description of Artificial Sequence:  Nucleic Acid
ccugccccugcuccagc

SEQ ID NO: 347 - RNA, 17 nt, Artificial Sequence
  Description of Artificial Sequence:  Nucleic Acid
gccccugcuccagccau

SEQ ID NO: 348 - RNA, 17 nt, Artificial Sequence
  Description of Artificial Sequence:  Nucleic Acid
cccugcuccagccaugg

SEQ ID NO: 349 - RNA, 17 nt, Artificial Sequence
  Description of Artificial Sequence:  Nucleic Acid
ccugcuccagccauggu

SEQ ID NO: 350 - RNA, 17 nt, Artificial Sequence
  Description of Artificial Sequence:  Nucleic Acid
gcuccagccaugguauc

SEQ ID NO: 351 - RNA, 17 nt, Artificial Sequence
  Description of Artificial Sequence:  Nucleic Acid
cuccagccaugguauca

SEQ ID NO: 352 - RNA, 17 nt, Artificial Sequence
  Description of Artificial Sequence:  Nucleic Acid
augguaucagcucuggc

SEQ ID NO: 353 - RNA, 17 nt, Artificial Sequence
  Description of Artificial Sequence:  Nucleic Acid
guaucagcucuggccca

SEQ ID NO: 354 - RNA, 17 nt, Artificial Sequence
  Description of Artificial Sequence:  Nucleic Acid
aucagcucuggcccagg

SEQ ID NO: 355 - RNA, 17 nt, Artificial Sequence
  Description of Artificial Sequence:  Nucleic Acid
gcucuggcccaggcccc

SEQ ID NO: 356 - RNA, 17 nt, Artificial Sequence
  Description of Artificial Sequence:  Nucleic Acid
cucuggcccaggcccca

SEQ ID NO: 357 - RNA, 17 nt, Artificial Sequence
  Description of Artificial Sequence:  Nucleic Acid
ucuggcccaggccccag

SEQ ID NO: 358 - RNA, 17 nt, Artificial Sequence
  Description of Artificial Sequence:  Nucleic Acid
gcccaggccccagcccc

SEQ ID NO: 359 - RNA, 17 nt, Artificial Sequence
  Description of Artificial Sequence:  Nucleic Acid
cccaggccccagccccu

SEQ ID NO: 360 - RNA, 17 nt, Artificial Sequence
  Description of Artificial Sequence:  Nucleic Acid
ccaggccccagccccug

SEQ ID NO: 361 - RNA, 17 nt, Artificial Sequence
  Description of Artificial Sequence:  Nucleic Acid
caggccccagccccugu

SEQ ID NO: 362 - RNA, 17 nt, Artificial Sequence
  Description of Artificial Sequence:  Nucleic Acid
gccccagccccuguccc

SEQ ID NO: 363 - RNA, 17 nt, Artificial Sequence
  Description of Artificial Sequence:  Nucleic Acid
ccccagccccuguccca

SEQ ID NO: 364 - RNA, 17 nt, Artificial Sequence
  Description of Artificial Sequence:  Nucleic Acid
cccagccccugucccag

SEQ ID NO: 365 - RNA, 17 nt, Artificial Sequence
  Description of Artificial Sequence:  Nucleic Acid
ccagccccugucccagu

SEQ ID NO: 366 - RNA, 17 nt, Artificial Sequence
  Description of Artificial Sequence:  Nucleic Acid
ccccugucccaguccua

SEQ ID NO: 367 - RNA, 17 nt, Artificial Sequence
  Description of Artificial Sequence:  Nucleic Acid
cccugucccaguccuag

SEQ ID NO: 368 - RNA, 17 nt, Artificial Sequence
  Description of Artificial Sequence:  Nucleic Acid
ccugucccaguccuagc

SEQ ID NO: 369 - RNA, 17 nt, Artificial Sequence
  Description of Artificial Sequence:  Nucleic Acid
ucccaguccuagcccca

SEQ ID NO: 370 - RNA, 17 nt, Artificial Sequence
  Description of Artificial Sequence:  Nucleic Acid
cccaguccuagccccag

SEQ ID NO: 371 - RNA, 17 nt, Artificial Sequence
  Description of Artificial Sequence:  Nucleic Acid
guccuagccccaggccc

SEQ ID NO: 372 - RNA, 17 nt, Artificial Sequence
  Description of Artificial Sequence:  Nucleic Acid
uccuagccccaggcccu

SEQ ID NO: 373 - RNA, 17 nt, Artificial Sequence
  Description of Artificial Sequence:  Nucleic Acid
ccuagccccaggcccuc

SEQ ID NO: 374 - RNA, 17 nt, Artificial Sequence
  Description of Artificial Sequence:  Nucleic Acid
cuagccccaggcccucc

SEQ ID NO: 375 - RNA, 17 nt, Artificial Sequence
  Description of Artificial Sequence:  Nucleic Acid
ccccaggcccuccucag

SEQ ID NO: 376 - RNA, 17 nt, Artificial Sequence
  Description of Artificial Sequence:  Nucleic Acid
cccaggcccuccucagg

SEQ ID NO: 377 - RNA, 17 nt, Artificial Sequence
  Description of Artificial Sequence:  Nucleic Acid
ccaggcccuccucaggc

SEQ ID NO: 378 - RNA, 17 nt, Artificial Sequence
  Description of Artificial Sequence:  Nucleic Acid
aggcccuccucaggcug

SEQ ID NO: 379 - RNA, 17 nt, Artificial Sequence
  Description of Artificial Sequence:  Nucleic Acid
ggcccuccucaggcugu

SEQ ID NO: 380 - RNA, 17 nt, Artificial Sequence
  Description of Artificial Sequence:  Nucleic Acid
cccuccucaggcugugg

SEQ ID NO: 381 - RNA, 17 nt, Artificial Sequence
  Description of Artificial Sequence:  Nucleic Acid
ccucaggcuguggcccc

SEQ ID NO: 382 - RNA, 17 nt, Artificial Sequence
  Description of Artificial Sequence:  Nucleic Acid
gcuguggccccaccugc

SEQ ID NO: 383 - RNA, 17 nt, Artificial Sequence
  Description of Artificial Sequence:  Nucleic Acid
cuguggccccaccugcc

SEQ ID NO: 384 - RNA, 17 nt, Artificial Sequence
  Description of Artificial Sequence:  Nucleic Acid
uguggccccaccugccc

SEQ ID NO: 385 - RNA, 17 nt, Artificial Sequence
  Description of Artificial Sequence:  Nucleic Acid
guggccccaccugcccc

SEQ ID NO: 386 - RNA, 17 nt, Artificial Sequence
  Description of Artificial Sequence:  Nucleic Acid
ggccccaccugccccca

SEQ ID NO: 387 - RNA, 17 nt, Artificial Sequence
  Description of Artificial Sequence:  Nucleic Acid
gccccaccugcccccaa

SEQ ID NO: 388 - RNA, 17 nt, Artificial Sequence
  Description of Artificial Sequence:  Nucleic Acid
ccaccugcccccaagcc

SEQ ID NO: 389 - RNA, 17 nt, Artificial Sequence
  Description of Artificial Sequence:  Nucleic Acid
caccugcccccaagccc

SEQ ID NO: 390 - RNA, 17 nt, Artificial Sequence
  Description of Artificial Sequence:  Nucleic Acid
accugcccccaagccca

SEQ ID NO: 391 - RNA, 17 nt, Artificial Sequence
  Description of Artificial Sequence:  Nucleic Acid
ccugcccccaagcccac

SEQ ID NO: 392 - RNA, 17 nt, Artificial Sequence
  Description of Artificial Sequence:  Nucleic Acid
cugcccccaagcccacc

SEQ ID NO: 393 - RNA, 17 nt, Artificial Sequence
  Description of Artificial Sequence:  Nucleic Acid
ccccaagcccacccagg

SEQ ID NO: 394 - RNA, 17 nt, Artificial Sequence
  Description of Artificial Sequence:  Nucleic Acid
cccaagcccacccaggc

SEQ ID NO: 395 - RNA, 17 nt, Artificial Sequence
  Description of Artificial Sequence:  Nucleic Acid
ccaagcccacccaggcu

SEQ ID NO: 396 - RNA, 17 nt, Artificial Sequence
  Description of Artificial Sequence:  Nucleic Acid
aagcccacccaggcugg

SEQ ID NO: 397 - RNA, 17 nt, Artificial Sequence
  Description of Artificial Sequence:  Nucleic Acid
agcccacccaggcuggg

SEQ ID NO: 398 - RNA, 17 nt, Artificial Sequence
  Description of Artificial Sequence:  Nucleic Acid
gcccacccaggcugggg

SEQ ID NO: 399 - RNA, 17 nt, Artificial Sequence
  Description of Artificial Sequence:  Nucleic Acid
acccaggcuggggaagg

SEQ ID NO: 400 - RNA, 17 nt, Artificial Sequence
  Description of Artificial Sequence:  Nucleic Acid
aggaacgcugucagagg

SEQ ID NO: 401 - RNA, 17 nt, Artificial Sequence
  Description of Artificial Sequence:  Nucleic Acid
acgcugucagaggcccu

SEQ ID NO: 402 - RNA, 17 nt, Artificial Sequence
  Description of Artificial Sequence:  Nucleic Acid
ucagaggcccugcugca

SEQ ID NO: 403 - RNA, 17 nt, Artificial Sequence
  Description of Artificial Sequence:  Nucleic Acid
cagaggcccugcugcag

SEQ ID NO: 404 - RNA, 17 nt, Artificial Sequence
  Description of Artificial Sequence:  Nucleic Acid
agaggcccugcugcagc

SEQ ID NO: 405 - RNA, 17 nt, Artificial Sequence
  Description of Artificial Sequence:  Nucleic Acid
ggcccugcugcagcugc

SEQ ID NO: 406 - RNA, 17 nt, Artificial Sequence
  Description of Artificial Sequence:  Nucleic Acid
ccugcugcagcugcagu

SEQ ID NO: 407 - RNA, 17 nt, Artificial Sequence
  Description of Artificial Sequence:  Nucleic Acid
gcugcagcugcaguuug

SEQ ID NO: 408 - RNA, 17 nt, Artificial Sequence
  Description of Artificial Sequence:  Nucleic Acid
gcagcugcaguuugaug

SEQ ID NO: 409 - RNA, 17 nt, Artificial Sequence
  Description of Artificial Sequence:  Nucleic Acid
augaagaccugggggcc

SEQ ID NO: 410 - RNA, 17 nt, Artificial Sequence
  Description of Artificial Sequence:  Nucleic Acid
ugaagaccugggggccu

SEQ ID NO: 411 - RNA, 17 nt, Artificial Sequence
  Description of Artificial Sequence:  Nucleic Acid
cugggggccuugcuugg

SEQ ID NO: 412 - RNA, 17 nt, Artificial Sequence
  Description of Artificial Sequence:  Nucleic Acid
ugggggccuugcuuggc

SEQ ID NO: 413 - RNA, 17 nt, Artificial Sequence
  Description of Artificial Sequence:  Nucleic Acid
ggccuugcuuggcaaca

SEQ ID NO: 414 - RNA, 17 nt, Artificial Sequence
  Description of Artificial Sequence:  Nucleic Acid
ugcuuggcaacagcaca

SEQ ID NO: 415 - RNA, 17 nt, Artificial Sequence
  Description of Artificial Sequence:  Nucleic Acid
uuggcaacagcacagac

SEQ ID NO: 416 - RNA, 17 nt, Artificial Sequence
  Description of Artificial Sequence:  Nucleic Acid
gcaacagcacagaccca

SEQ ID NO: 417 - RNA, 17 nt, Artificial Sequence
  Description of Artificial Sequence:  Nucleic Acid
aacagcacagacccagc

SEQ ID NO: 418 - RNA, 17 nt, Artificial Sequence
  Description of Artificial Sequence:  Nucleic Acid
gcacagacccagcugug

SEQ ID NO: 419 - RNA, 17 nt, Artificial Sequence
  Description of Artificial Sequence:  Nucleic Acid
cacagacccagcugugu

SEQ ID NO: 420 - RNA, 17 nt, Artificial Sequence
  Description of Artificial Sequence:  Nucleic Acid
acagacccagcuguguu

SEQ ID NO: 421 - RNA, 17 nt, Artificial Sequence
  Description of Artificial Sequence:  Nucleic Acid
gacccagcuguguucac

SEQ ID NO: 422 - RNA, 17 nt, Artificial Sequence
  Description of Artificial Sequence:  Nucleic Acid
cuguguucacagaccug

SEQ ID NO: 423 - RNA, 17 nt, Artificial Sequence
  Description of Artificial Sequence:  Nucleic Acid
guguucacagaccuggc

SEQ ID NO: 424 - RNA, 17 nt, Artificial Sequence
  Description of Artificial Sequence:  Nucleic Acid
ucacagaccuggcaucc

SEQ ID NO: 425 - RNA, 17 nt, Artificial Sequence
  Description of Artificial Sequence:  Nucleic Acid
cacagaccuggcauccg

SEQ ID NO: 426 - RNA, 17 nt, Artificial Sequence
  Description of Artificial Sequence:  Nucleic Acid
gaccuggcauccgucga

SEQ ID NO: 427 - RNA, 17 nt, Artificial Sequence
  Description of Artificial Sequence:  Nucleic Acid
cuggcauccgucgacaa

SEQ ID NO: 428 - RNA, 17 nt, Artificial Sequence
  Description of Artificial Sequence:  Nucleic Acid
ccgucgacaacuccgag

SEQ ID NO: 429 - RNA, 17 nt, Artificial Sequence
  Description of Artificial Sequence:  Nucleic Acid
ucgacaacuccgaguuu

SEQ ID NO: 430 - RNA, 17 nt, Artificial Sequence
  Description of Artificial Sequence:  Nucleic Acid
gacaacuccgaguuuca

SEQ ID NO: 431 - RNA, 17 nt, Artificial Sequence
  Description of Artificial Sequence:  Nucleic Acid
cgaguuucagcagcugc

SEQ ID NO: 432 - RNA, 17 nt, Artificial Sequence
  Description of Artificial Sequence:  Nucleic Acid
guuucagcagcugcuga

SEQ ID NO: 433 - RNA, 17 nt, Artificial Sequence
  Description of Artificial Sequence:  Nucleic Acid
ucagcagcugcugaacc

SEQ ID NO: 434 - RNA, 17 nt, Artificial Sequence
  Description of Artificial Sequence:  Nucleic Acid
gcagcugcugaaccagg

SEQ ID NO: 435 - RNA, 17 nt, Artificial Sequence
  Description of Artificial Sequence:  Nucleic Acid
ugcugaaccagggcaua

SEQ ID NO: 436 - RNA, 17 nt, Artificial Sequence
  Description of Artificial Sequence:  Nucleic Acid
gcugaaccagggcauac

SEQ ID NO: 437 - RNA, 17 nt, Artificial Sequence
  Description of Artificial Sequence:  Nucleic Acid
accagggcauaccugug

SEQ ID NO: 438 - RNA, 17 nt, Artificial Sequence
  Description of Artificial Sequence:  Nucleic Acid
gggcauaccuguggccc

SEQ ID NO: 439 - RNA, 17 nt, Artificial Sequence
  Description of Artificial Sequence:  Nucleic Acid
ggcauaccuguggcccc

SEQ ID NO: 440 - RNA, 17 nt, Artificial Sequence
  Description of Artificial Sequence:  Nucleic Acid
ccuguggccccccacac

SEQ ID NO: 441 - RNA, 17 nt, Artificial Sequence
  Description of Artificial Sequence:  Nucleic Acid
cuguggccccccacaca

SEQ ID NO: 442 - RNA, 17 nt, Artificial Sequence
  Description of Artificial Sequence:  Nucleic Acid
uguggccccccacacaa

SEQ ID NO: 443 - RNA, 17 nt, Artificial Sequence
  Description of Artificial Sequence:  Nucleic Acid
guggccccccacacaac

SEQ ID NO: 444 - RNA, 17 nt, Artificial Sequence
  Description of Artificial Sequence:  Nucleic Acid
uggccccccacacaacu

SEQ ID NO: 445 - RNA, 17 nt, Artificial Sequence
  Description of Artificial Sequence:  Nucleic Acid
ggccccccacacaacug

SEQ ID NO: 446 - RNA, 17 nt, Artificial Sequence
  Description of Artificial Sequence:  Nucleic Acid
ccccccacacaacugag

SEQ ID NO: 447 - RNA, 17 nt, Artificial Sequence
  Description of Artificial Sequence:  Nucleic Acid
ccccacacaacugagcc

SEQ ID NO: 448 - RNA, 17 nt, Artificial Sequence
  Description of Artificial Sequence:  Nucleic Acid
cacacaacugagcccau

SEQ ID NO: 449 - RNA, 17 nt, Artificial Sequence
  Description of Artificial Sequence:  Nucleic Acid
aacugagcccaugcuga

SEQ ID NO: 450 - RNA, 17 nt, Artificial Sequence
  Description of Artificial Sequence:  Nucleic Acid
acugagcccaugcugau

SEQ ID NO: 451 - RNA, 17 nt, Artificial Sequence
  Description of Artificial Sequence:  Nucleic Acid
cugagcccaugcugaug

SEQ ID NO: 452 - RNA, 17 nt, Artificial Sequence
  Description of Artificial Sequence:  Nucleic Acid
gcccaugcugauggagu

SEQ ID NO: 453 - RNA, 17 nt, Artificial Sequence
  Description of Artificial Sequence:  Nucleic Acid
uggaguacccugaggcu

SEQ ID NO: 454 - RNA, 17 nt, Artificial Sequence
  Description of Artificial Sequence:  Nucleic Acid
ggaguacccugaggcua

SEQ ID NO: 455 - RNA, 17 nt, Artificial Sequence
  Description of Artificial Sequence:  Nucleic Acid
gaguacccugaggcuau

SEQ ID NO: 456 - RNA, 17 nt, Artificial Sequence
  Description of Artificial Sequence:  Nucleic Acid
ccugaggcuauaacucg

SEQ ID NO: 457 - RNA, 17 nt, Artificial Sequence
  Description of Artificial Sequence:  Nucleic Acid
gcuauaacucgccuagu

SEQ ID NO: 458 - RNA, 17 nt, Artificial Sequence
  Description of Artificial Sequence:  Nucleic Acid
uaacucgccuagugaca

SEQ ID NO: 459 - RNA, 17 nt, Artificial Sequence
  Description of Artificial Sequence:  Nucleic Acid
aacucgccuagugacag

SEQ ID NO: 460 - RNA, 17 nt, Artificial Sequence
  Description of Artificial Sequence:  Nucleic Acid
cuagugacagcccagag

SEQ ID NO: 461 - RNA, 17 nt, Artificial Sequence
  Description of Artificial Sequence:  Nucleic Acid
gugacagcccagaggcc

SEQ ID NO: 462 - RNA, 17 nt, Artificial Sequence
  Description of Artificial Sequence:  Nucleic Acid
ugacagcccagaggccc

SEQ ID NO: 463 - RNA, 17 nt, Artificial Sequence
  Description of Artificial Sequence:  Nucleic Acid
gacagcccagaggcccc

SEQ ID NO: 464 - RNA, 17 nt, Artificial Sequence
  Description of Artificial Sequence:  Nucleic Acid
ccagaggccccccgacc

SEQ ID NO: 465 - RNA, 17 nt, Artificial Sequence
  Description of Artificial Sequence:  Nucleic Acid
cagaggccccccgaccc

SEQ ID NO: 466 - RNA, 17 nt, Artificial Sequence
  Description of Artificial Sequence:  Nucleic Acid
agaggccccccgaccca

SEQ ID NO: 467 - RNA, 17 nt, Artificial Sequence
  Description of Artificial Sequence:  Nucleic Acid
gaggccccccgacccag

SEQ ID NO: 468 - RNA, 17 nt, Artificial Sequence
  Description of Artificial Sequence:  Nucleic Acid
aggccccccgacccagc

SEQ ID NO: 469 - RNA, 17 nt, Artificial Sequence
  Description of Artificial Sequence:  Nucleic Acid
cccccgacccagcuccu

SEQ ID NO: 470 - RNA, 17 nt, Artificial Sequence
  Description of Artificial Sequence:  Nucleic Acid
ccccgacccagcuccug

SEQ ID NO: 471 - RNA, 17 nt, Artificial Sequence
  Description of Artificial Sequence:  Nucleic Acid
cccgacccagcuccugc

SEQ ID NO: 472 - RNA, 17 nt, Artificial Sequence
  Description of Artificial Sequence:  Nucleic Acid
gacccagcuccugcucc

SEQ ID NO: 473 - RNA, 17 nt, Artificial Sequence
  Description of Artificial Sequence:  Nucleic Acid
cccagcuccugcuccac

SEQ ID NO: 474 - RNA, 17 nt, Artificial Sequence
  Description of Artificial Sequence:  Nucleic Acid
ccagcuccugcuccacu

SEQ ID NO: 475 - RNA, 17 nt, Artificial Sequence
  Description of Artificial Sequence:  Nucleic Acid
gcuccugcuccacuggg

SEQ ID NO: 476 - RNA, 17 nt, Artificial Sequence
  Description of Artificial Sequence:  Nucleic Acid
uccugcuccacuggggg

SEQ ID NO: 477 - RNA, 17 nt, Artificial Sequence
  Description of Artificial Sequence:  Nucleic Acid
ccugcuccacugggggc

SEQ ID NO: 478 - RNA, 17 nt, Artificial Sequence
  Description of Artificial Sequence:  Nucleic Acid
ugcuccacugggggccc

SEQ ID NO: 479 - RNA, 17 nt, Artificial Sequence
  Description of Artificial Sequence:  Nucleic Acid
cugggggccccggggcu

SEQ ID NO: 480 - RNA, 17 nt, Artificial Sequence
  Description of Artificial Sequence:  Nucleic Acid
ugggggccccggggcuc

SEQ ID NO: 481 - RNA, 17 nt, Artificial Sequence
  Description of Artificial Sequence:  Nucleic Acid
gggggccccggggcucc

SEQ ID NO: 482 - RNA, 17 nt, Artificial Sequence
  Description of Artificial Sequence:  Nucleic Acid
cccggggcuccccaaug

SEQ ID NO: 483 - RNA, 17 nt, Artificial Sequence
  Description of Artificial Sequence:  Nucleic Acid
cggggcuccccaauggc

SEQ ID NO: 484 - RNA, 17 nt, Artificial Sequence
  Description of Artificial Sequence:  Nucleic Acid
ggggcuccccaauggcc

SEQ ID NO: 485 - RNA, 17 nt, Artificial Sequence
  Description of Artificial Sequence:  Nucleic Acid
gggcuccccaauggccu

SEQ ID NO: 486 - RNA, 17 nt, Artificial Sequence
  Description of Artificial Sequence:  Nucleic Acid
ggcuccccaauggccuc

SEQ ID NO: 487 - RNA, 17 nt, Artificial Sequence
  Description of Artificial Sequence:  Nucleic Acid
ccaauggccuccuuuca

SEQ ID NO: 488 - RNA, 17 nt, Artificial Sequence
  Description of Artificial Sequence:  Nucleic Acid
caauggccuccuuucag

SEQ ID NO: 489 - RNA, 17 nt, Artificial Sequence
  Description of Artificial Sequence:  Nucleic Acid
auggccuccuuucagga

SEQ ID NO: 490 - RNA, 17 nt, Artificial Sequence
  Description of Artificial Sequence:  Nucleic Acid
uggccuccuuucaggag

SEQ ID NO: 491 - RNA, 17 nt, Artificial Sequence
  Description of Artificial Sequence:  Nucleic Acid
cuccuuucaggagauga

SEQ ID NO: 492 - RNA, 17 nt, Artificial Sequence
  Description of Artificial Sequence:  Nucleic Acid
augaagacuucuccucc

SEQ ID NO: 493 - RNA, 17 nt, Artificial Sequence
  Description of Artificial Sequence:  Nucleic Acid
aagacuucuccuccauu

SEQ ID NO: 494 - RNA, 17 nt, Artificial Sequence
  Description of Artificial Sequence:  Nucleic Acid
gacuucuccuccauugc

SEQ ID NO: 495 - RNA, 17 nt, Artificial Sequence
  Description of Artificial Sequence:  Nucleic Acid
acuucuccuccauugcg

SEQ ID NO: 496 - RNA, 17 nt, Artificial Sequence
  Description of Artificial Sequence:  Nucleic Acid
uucuccuccauugcgga

SEQ ID NO: 497 - RNA, 17 nt, Artificial Sequence
  Description of Artificial Sequence:  Nucleic Acid
ucuccuccauugcggac

SEQ ID NO: 498 - RNA, 17 nt, Artificial Sequence
  Description of Artificial Sequence:  Nucleic Acid
uugcggacauggacuuc

SEQ ID NO: 499 - RNA, 17 nt, Artificial Sequence
  Description of Artificial Sequence:  Nucleic Acid
acauggacuucucagcc

SEQ ID NO: 500 - RNA, 17 nt, Artificial Sequence
  Description of Artificial Sequence:  Nucleic Acid
uggacuucucagcccug

SEQ ID NO: 501 - RNA, 17 nt, Artificial Sequence
  Description of Artificial Sequence:  Nucleic Acid
gacuucucagcccugcu

SEQ ID NO: 502 - RNA, 17 nt, Artificial Sequence
  Description of Artificial Sequence:  Nucleic Acid
uucucagcccugcugag

SEQ ID NO: 503 - RNA, 17 nt, Artificial Sequence
  Description of Artificial Sequence:  Nucleic Acid
ucucagcccugcugagu

SEQ ID NO: 504 - RNA, 17 nt, Artificial Sequence
  Description of Artificial Sequence:  Nucleic Acid
cucagcccugcugaguc

SEQ ID NO: 505 - RNA, 17 nt, Artificial Sequence
  Description of Artificial Sequence:  Nucleic Acid
agcccugcugagucaga

SEQ ID NO: 506 - RNA, 17 nt, Artificial Sequence
  Description of Artificial Sequence:  Nucleic Acid
gcugagucagaucagcu

SEQ ID NO: 507 - RNA, 17 nt, Artificial Sequence
  Description of Artificial Sequence:  Nucleic Acid
gucagaucagcuccuaa

SEQ ID NO: 508 - RNA, 17 nt, Artificial Sequence
  Description of Artificial Sequence:  Nucleic Acid
agaucagcuccuaaggg

SEQ ID NO: 509 - RNA, 17 nt, Artificial Sequence
  Description of Artificial Sequence:  Nucleic Acid
aucagcuccuaaggggg

SEQ ID NO: 510 - RNA, 17 nt, Artificial Sequence
  Description of Artificial Sequence:  Nucleic Acid
ucagcuccuaagggggu

SEQ ID NO: 511 - RNA, 17 nt, Artificial Sequence
  Description of Artificial Sequence:  Nucleic Acid
ggugacgccugcccucc

SEQ ID NO: 512 - RNA, 17 nt, Artificial Sequence
  Description of Artificial Sequence:  Nucleic Acid
gugacgccugcccuccc

SEQ ID NO: 513 - RNA, 17 nt, Artificial Sequence
  Description of Artificial Sequence:  Nucleic Acid
acgccugcccuccccag

SEQ ID NO: 514 - RNA, 17 nt, Artificial Sequence
  Description of Artificial Sequence:  Nucleic Acid
cgccugcccuccccaga

SEQ ID NO: 515 - RNA, 17 nt, Artificial Sequence
  Description of Artificial Sequence:  Nucleic Acid
gccugcccuccccagag

SEQ ID NO: 516 - RNA, 17 nt, Artificial Sequence
  Description of Artificial Sequence:  Nucleic Acid
cugcccuccccagagca

SEQ ID NO: 517 - RNA, 17 nt, Artificial Sequence
  Description of Artificial Sequence:  Nucleic Acid
ugcccuccccagagcac

SEQ ID NO: 518 - RNA, 17 nt, Artificial Sequence
  Description of Artificial Sequence:  Nucleic Acid
gcccuccccagagcacu

SEQ ID NO: 519 - RNA, 17 nt, Artificial Sequence
  Description of Artificial Sequence:  Nucleic Acid
cccuccccagagcacug

SEQ ID NO: 520 - RNA, 17 nt, Artificial Sequence
  Description of Artificial Sequence:  Nucleic Acid
cccagagcacugguugc

SEQ ID NO: 521 - RNA, 17 nt, Artificial Sequence
  Description of Artificial Sequence:  Nucleic Acid
cagagcacugguugcag

SEQ ID NO: 522 - RNA, 17 nt, Artificial Sequence
  Description of Artificial Sequence:  Nucleic Acid
cugguugcaggggauug

SEQ ID NO: 523 - RNA, 17 nt, Artificial Sequence
  Description of Artificial Sequence:  Nucleic Acid
auugaagcccuccaaaa

SEQ ID NO: 524 - RNA, 17 nt, Artificial Sequence
  Description of Artificial Sequence:  Nucleic Acid
uugaagcccuccaaaag

SEQ ID NO: 525 - RNA, 17 nt, Artificial Sequence
  Description of Artificial Sequence:  Nucleic Acid
ugaagcccuccaaaagc

SEQ ID NO: 526 - RNA, 17 nt, Artificial Sequence
  Description of Artificial Sequence:  Nucleic Acid
aagcccuccaaaagcac

SEQ ID NO: 527 - RNA, 17 nt, Artificial Sequence
  Description of Artificial Sequence:  Nucleic Acid
agcccuccaaaagcacu

SEQ ID NO: 528 - RNA, 17 nt, Artificial Sequence
  Description of Artificial Sequence:  Nucleic Acid
ccaaaagcacuuacgga

SEQ ID NO: 529 - RNA, 17 nt, Artificial Sequence
  Description of Artificial Sequence:  Nucleic Acid
aaaagcacuuacggauu

SEQ ID NO: 530 - RNA, 17 nt, Artificial Sequence
  Description of Artificial Sequence:  Nucleic Acid
acggauucugguggggu

SEQ ID NO: 531 - RNA, 17 nt, Artificial Sequence
  Description of Artificial Sequence:  Nucleic Acid
guguguuccaacugccc

SEQ ID NO: 532 - RNA, 17 nt, Artificial Sequence
  Description of Artificial Sequence:  Nucleic Acid
uguguuccaacugcccc

SEQ ID NO: 533 - RNA, 17 nt, Artificial Sequence
  Description of Artificial Sequence:  Nucleic Acid
guuccaacugcccccaa

SEQ ID NO: 534 - RNA, 17 nt, Artificial Sequence
  Description of Artificial Sequence:  Nucleic Acid
ccaacugcccccaacuu

SEQ ID NO: 535 - RNA, 17 nt, Artificial Sequence
  Description of Artificial Sequence:  Nucleic Acid
caacugcccccaacuuu

SEQ ID NO: 536 - RNA, 17 nt, Artificial Sequence
  Description of Artificial Sequence:  Nucleic Acid
aacugcccccaacuuug

SEQ ID NO: 537 - RNA, 17 nt, Artificial Sequence
  Description of Artificial Sequence:  Nucleic Acid
acugcccccaacuuugu

SEQ ID NO: 538 - RNA, 17 nt, Artificial Sequence
  Description of Artificial Sequence:  Nucleic Acid
cugcccccaacuuugug

SEQ ID NO: 539 - RNA, 17 nt, Artificial Sequence
  Description of Artificial Sequence:  Nucleic Acid
cccccaacuuuguggau

SEQ ID NO: 540 - RNA, 17 nt, Artificial Sequence
  Description of Artificial Sequence:  Nucleic Acid
uggaugucuuccuugga

SEQ ID NO: 541 - RNA, 17 nt, Artificial Sequence
  Description of Artificial Sequence:  Nucleic Acid
augucuuccuuggaggg

SEQ ID NO: 542 - RNA, 17 nt, Artificial Sequence
  Description of Artificial Sequence:  Nucleic Acid
ugucuuccuuggagggg

SEQ ID NO: 543 - RNA, 17 nt, Artificial Sequence
  Description of Artificial Sequence:  Nucleic Acid
gggggagccauauuuua

SEQ ID NO: 544 - RNA, 17 nt, Artificial Sequence
  Description of Artificial Sequence:  Nucleic Acid
ggggagccauauuuuau

SEQ ID NO: 545 - RNA, 17 nt, Artificial Sequence
  Description of Artificial Sequence:  Nucleic Acid
uuuuauucuuuuauugu

SEQ ID NO: 546 - RNA, 17 nt, Artificial Sequence
  Description of Artificial Sequence:  Nucleic Acid
uuauugucaguaucugu

SEQ ID NO: 547 - RNA, 17 nt, Artificial Sequence
  Description of Artificial Sequence:  Nucleic Acid
ucaguaucuguaucucu

SEQ ID NO: 548 - RNA, 17 nt, Artificial Sequence
  Description of Artificial Sequence:  Nucleic Acid
ucuguaucucucucucu

SEQ ID NO: 549 - RNA, 17 nt, Artificial Sequence
  Description of Artificial Sequence:  Nucleic Acid
uguaucucucucucuuu

SEQ ID NO: 550 - RNA, 17 nt, Artificial Sequence
  Description of Artificial Sequence:  Nucleic Acid
uaucucucucucuuuuu

SEQ ID NO: 551 - RNA, 17 nt, Artificial Sequence
  Description of Artificial Sequence:  Nucleic Acid
ucucucucucuuuuugg

SEQ ID NO: 552 - RNA, 17 nt, Artificial Sequence
  Description of Artificial Sequence:  Nucleic Acid
ucucucucuuuuuggag

SEQ ID NO: 553 - RNA, 17 nt, Artificial Sequence
  Description of Artificial Sequence:  Nucleic Acid
ggaggugcuuaagcaga

SEQ ID NO: 554 - RNA, 17 nt, Artificial Sequence
  Description of Artificial Sequence:  Nucleic Acid
gcuuaagcagaagcauu

SEQ ID NO: 555 - RNA, 17 nt, Artificial Sequence
  Description of Artificial Sequence:  Nucleic Acid
gcagaagcauuaacuuc

SEQ ID NO: 556 - RNA, 17 nt, Artificial Sequence
  Description of Artificial Sequence:  Nucleic Acid
gcauuaacuucucugga

SEQ ID NO: 557 - RNA, 17 nt, Artificial Sequence
  Description of Artificial Sequence:  Nucleic Acid
uuaacuucucuggaaag

SEQ ID NO: 558 - RNA, 17 nt, Artificial Sequence
  Description of Artificial Sequence:  Nucleic Acid
aacuucucuggaaaggg

SEQ ID NO: 559 - RNA, 17 nt, Artificial Sequence
  Description of Artificial Sequence:  Nucleic Acid
gggggagcuggggaaac

SEQ ID NO: 560 - RNA, 17 nt, Artificial Sequence
  Description of Artificial Sequence:  Nucleic Acid
ggggaaacucaaacuuu

SEQ ID NO: 561 - RNA, 17 nt, Artificial Sequence
  Description of Artificial Sequence:  Nucleic Acid
ggaaacucaaacuuuuc

SEQ ID NO: 562 - RNA, 17 nt, Artificial Sequence
  Description of Artificial Sequence:  Nucleic Acid
acucaaacuuuuccccu

SEQ ID NO: 563 - RNA, 17 nt, Artificial Sequence
  Description of Artificial Sequence:  Nucleic Acid
aacuuuuccccuguccu

SEQ ID NO: 564 - RNA, 17 nt, Artificial Sequence
  Description of Artificial Sequence:  Nucleic Acid
acuuuuccccuguccug

SEQ ID NO: 565 - RNA, 17 nt, Artificial Sequence
  Description of Artificial Sequence:  Nucleic Acid
cuuuuccccuguccuga

SEQ ID NO: 566 - RNA, 17 nt, Artificial Sequence
  Description of Artificial Sequence:  Nucleic Acid
uuuuccccuguccugau

SEQ ID NO: 567 - RNA, 17 nt, Artificial Sequence
  Description of Artificial Sequence:  Nucleic Acid
ccccuguccugaugguc

SEQ ID NO: 568 - RNA, 17 nt, Artificial Sequence
  Description of Artificial Sequence:  Nucleic Acid
cccuguccugaugguca

SEQ ID NO: 569 - RNA, 17 nt, Artificial Sequence
  Description of Artificial Sequence:  Nucleic Acid
ugauggucagcucccuu

SEQ ID NO: 570 - RNA, 17 nt, Artificial Sequence
  Description of Artificial Sequence:  Nucleic Acid
uggucagcucccuucuc

SEQ ID NO: 571 - RNA, 17 nt, Artificial Sequence
  Description of Artificial Sequence:  Nucleic Acid
gucagcucccuucucug

SEQ ID NO: 572 - RNA, 17 nt, Artificial Sequence
  Description of Artificial Sequence:  Nucleic Acid
ucagcucccuucucugu

SEQ ID NO: 573 - RNA, 17 nt, Artificial Sequence
  Description of Artificial Sequence:  Nucleic Acid
cagcucccuucucugua

SEQ ID NO: 574 - RNA, 17 nt, Artificial Sequence
  Description of Artificial Sequence:  Nucleic Acid
cucccuucucuguaggg

SEQ ID NO: 575 - RNA, 17 nt, Artificial Sequence
  Description of Artificial Sequence:  Nucleic Acid
cccuucucuguagggaa

SEQ ID NO: 576 - RNA, 17 nt, Artificial Sequence
  Description of Artificial Sequence:  Nucleic Acid
uagggaacugugggguc

SEQ ID NO: 577 - RNA, 17 nt, Artificial Sequence
  Description of Artificial Sequence:  Nucleic Acid
guggggucccccauccc

SEQ ID NO: 578 - RNA, 17 nt, Artificial Sequence
  Description of Artificial Sequence:  Nucleic Acid
uggggucccccaucccc

SEQ ID NO: 579 - RNA, 17 nt, Artificial Sequence
  Description of Artificial Sequence:  Nucleic Acid
ggggucccccaucccca

SEQ ID NO: 580 - RNA, 17 nt, Artificial Sequence
  Description of Artificial Sequence:  Nucleic Acid
gggucccccauccccau

SEQ ID NO: 581 - RNA, 17 nt, Artificial Sequence
  Description of Artificial Sequence:  Nucleic Acid
ggucccccauccccauc

SEQ ID NO: 582 - RNA, 17 nt, Artificial Sequence
  Description of Artificial Sequence:  Nucleic Acid
cccccauccccauccuc

SEQ ID NO: 583 - RNA, 17 nt, Artificial Sequence
  Description of Artificial Sequence:  Nucleic Acid
ccccauccccauccucc

SEQ ID NO: 584 - RNA, 17 nt, Artificial Sequence
  Description of Artificial Sequence:  Nucleic Acid
cccauccccauccucca

SEQ ID NO: 585 - RNA, 17 nt, Artificial Sequence
  Description of Artificial Sequence:  Nucleic Acid
ccauccccauccuccag

SEQ ID NO: 586 - RNA, 17 nt, Artificial Sequence
  Description of Artificial Sequence:  Nucleic Acid
uccccauccuccagcuu

SEQ ID NO: 587 - RNA, 17 nt, Artificial Sequence
  Description of Artificial Sequence:  Nucleic Acid
ccccauccuccagcuuc

SEQ ID NO: 588 - RNA, 17 nt, Artificial Sequence
  Description of Artificial Sequence:  Nucleic Acid
ccauccuccagcuucug

SEQ ID NO: 589 - RNA, 17 nt, Artificial Sequence
  Description of Artificial Sequence:  Nucleic Acid
cauccuccagcuucugg

SEQ ID NO: 590 - RNA, 17 nt, Artificial Sequence
  Description of Artificial Sequence:  Nucleic Acid
ccuccagcuucugguac

SEQ ID NO: 591 - RNA, 17 nt, Artificial Sequence
  Description of Artificial Sequence:  Nucleic Acid
ccagcuucugguacucu

SEQ ID NO: 592 - RNA, 17 nt, Artificial Sequence
  Description of Artificial Sequence:  Nucleic Acid
ucugguacucuccuaga

SEQ ID NO: 593 - RNA, 17 nt, Artificial Sequence
  Description of Artificial Sequence:  Nucleic Acid
ugguacucuccuagaga

SEQ ID NO: 594 - RNA, 17 nt, Artificial Sequence
  Description of Artificial Sequence:  Nucleic Acid
guacucuccuagagaca

SEQ ID NO: 595 - RNA, 17 nt, Artificial Sequence
  Description of Artificial Sequence:  Nucleic Acid
uacucuccuagagacag

SEQ ID NO: 596 - RNA, 17 nt, Artificial Sequence
  Description of Artificial Sequence:  Nucleic Acid
cuagagacagaagcagg

SEQ ID NO: 597 - RNA, 17 nt, Artificial Sequence
  Description of Artificial Sequence:  Nucleic Acid
acagaagcaggcuggag

SEQ ID NO: 598 - RNA, 17 nt, Artificial Sequence
  Description of Artificial Sequence:  Nucleic Acid
aagcaggcuggagguaa

SEQ ID NO: 599 - RNA, 17 nt, Artificial Sequence
  Description of Artificial Sequence:  Nucleic Acid
gguaaggccuuugagcc

SEQ ID NO: 600 - RNA, 17 nt, Artificial Sequence
  Description of Artificial Sequence:  Nucleic Acid
guaaggccuuugagccc

SEQ ID NO: 601 - RNA, 17 nt, Artificial Sequence
  Description of Artificial Sequence:  Nucleic Acid
cuuugagcccacaaagc

SEQ ID NO: 602 - RNA, 17 nt, Artificial Sequence
  Description of Artificial Sequence:  Nucleic Acid
uuugagcccacaaagcc

SEQ ID NO: 603 - RNA, 17 nt, Artificial Sequence
  Description of Artificial Sequence:  Nucleic Acid
uugagcccacaaagccu

SEQ ID NO: 604 - RNA, 17 nt, Artificial Sequence
  Description of Artificial Sequence:  Nucleic Acid
gagcccacaaagccuua

SEQ ID NO: 605 - RNA, 17 nt, Artificial Sequence
  Description of Artificial Sequence:  Nucleic Acid
cacaaagccuuaucaag

SEQ ID NO: 606 - RNA, 17 nt, Artificial Sequence
  Description of Artificial Sequence:  Nucleic Acid
acaaagccuuaucaagu

SEQ ID NO: 607 - RNA, 17 nt, Artificial Sequence
  Description of Artificial Sequence:  Nucleic Acid
gccuuaucaagugucuu

SEQ ID NO: 608 - RNA, 17 nt, Artificial Sequence
  Description of Artificial Sequence:  Nucleic Acid
caagugucuuccaucau

SEQ ID NO: 609 - RNA, 17 nt, Artificial Sequence
  Description of Artificial Sequence:  Nucleic Acid
gugucuuccaucaugga

SEQ ID NO: 610 - RNA, 17 nt, Artificial Sequence
  Description of Artificial Sequence:  Nucleic Acid
ugucuuccaucauggau

SEQ ID NO: 611 - RNA, 17 nt, Artificial Sequence
  Description of Artificial Sequence:  Nucleic Acid
cuuccaucauggauuca

SEQ ID NO: 612 - RNA, 17 nt, Artificial Sequence
  Description of Artificial Sequence:  Nucleic Acid
auggauucauuacagcu

SEQ ID NO: 613 - RNA, 17 nt, Artificial Sequence
  Description of Artificial Sequence:  Nucleic Acid
uucauuacagcuuaauc

SEQ ID NO: 614 - RNA, 17 nt, Artificial Sequence
  Description of Artificial Sequence:  Nucleic Acid
auuacagcuuaaucaaa

SEQ ID NO: 615 - RNA, 17 nt, Artificial Sequence
  Description of Artificial Sequence:  Nucleic Acid
gcuuaaucaaaauaacg

SEQ ID NO: 616 - RNA, 17 nt, Artificial Sequence
  Description of Artificial Sequence:  Nucleic Acid
aauaacgccccagauac

SEQ ID NO: 617 - RNA, 17 nt, Artificial Sequence
  Description of Artificial Sequence:  Nucleic Acid
auaacgccccagauacc

SEQ ID NO: 618 - RNA, 17 nt, Artificial Sequence
  Description of Artificial Sequence:  Nucleic Acid
uaacgccccagauacca

SEQ ID NO: 619 - RNA, 17 nt, Artificial Sequence
  Description of Artificial Sequence:  Nucleic Acid
aacgccccagauaccag

SEQ ID NO: 620 - RNA, 17 nt, Artificial Sequence
  Description of Artificial Sequence:  Nucleic Acid
ccagauaccagccccug

SEQ ID NO: 621 - RNA, 17 nt, Artificial Sequence
  Description of Artificial Sequence:  Nucleic Acid
cagauaccagccccugu

SEQ ID NO: 622 - RNA, 17 nt, Artificial Sequence
  Description of Artificial Sequence:  Nucleic Acid
auaccagccccuguaug

SEQ ID NO: 623 - RNA, 17 nt, Artificial Sequence
  Description of Artificial Sequence:  Nucleic Acid
uaccagccccuguaugg

SEQ ID NO: 624 - RNA, 17 nt, Artificial Sequence
  Description of Artificial Sequence:  Nucleic Acid
accagccccuguauggc

SEQ ID NO: 625 - RNA, 17 nt, Artificial Sequence
  Description of Artificial Sequence:  Nucleic Acid
ccagccccuguauggca

SEQ ID NO: 626 - RNA, 17 nt, Artificial Sequence
  Description of Artificial Sequence:  Nucleic Acid
uguauggcacuggcauu

SEQ ID NO: 627 - RNA, 17 nt, Artificial Sequence
  Description of Artificial Sequence:  Nucleic Acid
uauggcacuggcauugu

SEQ ID NO: 628 - RNA, 17 nt, Artificial Sequence
  Description of Artificial Sequence:  Nucleic Acid
gcacuggcauugucccu

SEQ ID NO: 629 - RNA, 17 nt, Artificial Sequence
  Description of Artificial Sequence:  Nucleic Acid
gcauugucccugugccu

SEQ ID NO: 630 - RNA, 17 nt, Artificial Sequence
  Description of Artificial Sequence:  Nucleic Acid
cauugucccugugccua

SEQ ID NO: 631 - RNA, 17 nt, Artificial Sequence
  Description of Artificial Sequence:  Nucleic Acid
auugucccugugccuaa

SEQ ID NO: 632 - RNA, 17 nt, Artificial Sequence
  Description of Artificial Sequence:  Nucleic Acid
cccugugccuaacacca

SEQ ID NO: 633 - RNA, 17 nt, Artificial Sequence
  Description of Artificial Sequence:  Nucleic Acid
ccugugccuaacaccag

SEQ ID NO: 634 - RNA, 17 nt, Artificial Sequence
  Description of Artificial Sequence:  Nucleic Acid
ugccuaacaccagcguu

SEQ ID NO: 635 - RNA, 17 nt, Artificial Sequence
  Description of Artificial Sequence:  Nucleic Acid
ccuaacaccagcguuug

SEQ ID NO: 636 - RNA, 17 nt, Artificial Sequence
  Description of Artificial Sequence:  Nucleic Acid
cuaacaccagcguuuga

SEQ ID NO: 637 - RNA, 17 nt, Artificial Sequence
  Description of Artificial Sequence:  Nucleic Acid
ugaggggcugccuuccu

SEQ ID NO: 638 - RNA, 17 nt, Artificial Sequence
  Description of Artificial Sequence:  Nucleic Acid
ggggcugccuuccugcc

SEQ ID NO: 639 - RNA, 17 nt, Artificial Sequence
  Description of Artificial Sequence:  Nucleic Acid
gggcugccuuccugccc

SEQ ID NO: 640 - RNA, 17 nt, Artificial Sequence
  Description of Artificial Sequence:  Nucleic Acid
cugccuuccugcccuac

SEQ ID NO: 641 - RNA, 17 nt, Artificial Sequence
  Description of Artificial Sequence:  Nucleic Acid
ugccuuccugcccuaca

SEQ ID NO: 642 - RNA, 17 nt, Artificial Sequence
  Description of Artificial Sequence:  Nucleic Acid
cuuccugcccuacagag

SEQ ID NO: 643 - RNA, 17 nt, Artificial Sequence
  Description of Artificial Sequence:  Nucleic Acid
uuccugcccuacagagg

SEQ ID NO: 644 - RNA, 17 nt, Artificial Sequence
  Description of Artificial Sequence:  Nucleic Acid
uccugcccuacagaggu

SEQ ID NO: 645 - RNA, 17 nt, Artificial Sequence
  Description of Artificial Sequence:  Nucleic Acid
ugcccuacagaggucuc

SEQ ID NO: 646 - RNA, 17 nt, Artificial Sequence
  Description of Artificial Sequence:  Nucleic Acid
cagaggucucugccggc

SEQ ID NO: 647 - RNA, 17 nt, Artificial Sequence
  Description of Artificial Sequence:  Nucleic Acid
gaggucucugccggcuc

SEQ ID NO: 648 - RNA, 17 nt, Artificial Sequence
  Description of Artificial Sequence:  Nucleic Acid
gucucugccggcucuuu

SEQ ID NO: 649 - RNA, 17 nt, Artificial Sequence
  Description of Artificial Sequence:  Nucleic Acid
cugccggcucuuuccuu

SEQ ID NO: 650 - RNA, 17 nt, Artificial Sequence
  Description of Artificial Sequence:  Nucleic Acid
gccggcucuuuccuugc

SEQ ID NO: 651 - RNA, 17 nt, Artificial Sequence
  Description of Artificial Sequence:  Nucleic Acid
gcucuuuccuugcucaa

SEQ ID NO: 652 - RNA, 17 nt, Artificial Sequence
  Description of Artificial Sequence:  Nucleic Acid
cucuuuccuugcucaac

SEQ ID NO: 653 - RNA, 17 nt, Artificial Sequence
  Description of Artificial Sequence:  Nucleic Acid
uuccuugcucaaccaug

SEQ ID NO: 654 - RNA, 17 nt, Artificial Sequence
  Description of Artificial Sequence:  Nucleic Acid
ccuugcucaaccauggc

SEQ ID NO: 655 - RNA, 17 nt, Artificial Sequence
  Description of Artificial Sequence:  Nucleic Acid
ugcucaaccauggcuga

SEQ ID NO: 656 - RNA, 17 nt, Artificial Sequence
  Description of Artificial Sequence:  Nucleic Acid
gcucaaccauggcugaa

SEQ ID NO: 657 - RNA, 17 nt, Artificial Sequence
  Description of Artificial Sequence:  Nucleic Acid
accauggcugaaggaaa

SEQ ID NO: 658 - RNA, 17 nt, Artificial Sequence
  Description of Artificial Sequence:  Nucleic Acid
aaggaaacagugcaaca

SEQ ID NO: 659 - RNA, 17 nt, Artificial Sequence
  Description of Artificial Sequence:  Nucleic Acid
aacagugcaacagcacu

SEQ ID NO: 660 - RNA, 17 nt, Artificial Sequence
  Description of Artificial Sequence:  Nucleic Acid
agugcaacagcacuggc

SEQ ID NO: 661 - RNA, 17 nt, Artificial Sequence
  Description of Artificial Sequence:  Nucleic Acid
gcaacagcacuggcucu

SEQ ID NO: 662 - RNA, 17 nt, Artificial Sequence
  Description of Artificial Sequence:  Nucleic Acid
aacagcacuggcucucu

SEQ ID NO: 663 - RNA, 17 nt, Artificial Sequence
  Description of Artificial Sequence:  Nucleic Acid
gcacuggcucucuccag

SEQ ID NO: 664 - RNA, 17 nt, Artificial Sequence
  Description of Artificial Sequence:  Nucleic Acid
acuggcucucuccagga

SEQ ID NO: 665 - RNA, 17 nt, Artificial Sequence
  Description of Artificial Sequence:  Nucleic Acid
uggcucucuccaggauc

SEQ ID NO: 666 - RNA, 17 nt, Artificial Sequence
  Description of Artificial Sequence:  Nucleic Acid
gcucucuccaggaucca

SEQ ID NO: 667 - RNA, 17 nt, Artificial Sequence
  Description of Artificial Sequence:  Nucleic Acid
cucucuccaggauccag

SEQ ID NO: 668 - RNA, 17 nt, Artificial Sequence
  Description of Artificial Sequence:  Nucleic Acid
ccaggauccagaagggg

SEQ ID NO: 669 - RNA, 17 nt, Artificial Sequence
  Description of Artificial Sequence:  Nucleic Acid
caggauccagaaggggu

SEQ ID NO: 670 - RNA, 17 nt, Artificial Sequence
  Description of Artificial Sequence:  Nucleic Acid
guuuggucuggacuucc

SEQ ID NO: 671 - RNA, 17 nt, Artificial Sequence
  Description of Artificial Sequence:  Nucleic Acid
gucuggacuuccuugcu

SEQ ID NO: 672 - RNA, 17 nt, Artificial Sequence
  Description of Artificial Sequence:  Nucleic Acid
uggacuuccuugcucuc

SEQ ID NO: 673 - RNA, 17 nt, Artificial Sequence
  Description of Artificial Sequence:  Nucleic Acid
ggacuuccuugcucucc

SEQ ID NO: 674 - RNA, 17 nt, Artificial Sequence
  Description of Artificial Sequence:  Nucleic Acid
uuccuugcucuccccuc

SEQ ID NO: 675 - RNA, 17 nt, Artificial Sequence
  Description of Artificial Sequence:  Nucleic Acid
ccuugcucuccccucuu

SEQ ID NO: 676 - RNA, 17 nt, Artificial Sequence
  Description of Artificial Sequence:  Nucleic Acid
uugcucuccccucuucu

SEQ ID NO: 677 - RNA, 17 nt, Artificial Sequence
  Description of Artificial Sequence:  Nucleic Acid
ugcucuccccucuucuc

SEQ ID NO: 678 - RNA, 17 nt, Artificial Sequence
  Description of Artificial Sequence:  Nucleic Acid
gcucuccccucuucuca

SEQ ID NO: 679 - RNA, 17 nt, Artificial Sequence
  Description of Artificial Sequence:  Nucleic Acid
cucuccccucuucucaa

SEQ ID NO: 680 - RNA, 17 nt, Artificial Sequence
  Description of Artificial Sequence:  Nucleic Acid
cuccccucuucucaagu

SEQ ID NO: 681 - RNA, 17 nt, Artificial Sequence
  Description of Artificial Sequence:  Nucleic Acid
cccucuucucaagugcc

SEQ ID NO: 682 - RNA, 17 nt, Artificial Sequence
  Description of Artificial Sequence:  Nucleic Acid
cucuucucaagugccuu

SEQ ID NO: 683 - RNA, 17 nt, Artificial Sequence
  Description of Artificial Sequence:  Nucleic Acid
ucaagugccuuaauagu

SEQ ID NO: 684 - RNA, 17 nt, Artificial Sequence
  Description of Artificial Sequence:  Nucleic Acid
caagugccuuaauagua

SEQ ID NO: 685 - RNA, 17 nt, Artificial Sequence
  Description of Artificial Sequence:  Nucleic Acid
gggagagcaggcuggca

SEQ ID NO: 686 - RNA, 17 nt, Artificial Sequence
  Description of Artificial Sequence:  Nucleic Acid
gagcaggcuggcagcuc

SEQ ID NO: 687 - RNA, 17 nt, Artificial Sequence
  Description of Artificial Sequence:  Nucleic Acid
aggcuggcagcucucca

SEQ ID NO: 688 - RNA, 17 nt, Artificial Sequence
  Description of Artificial Sequence:  Nucleic Acid
cuggcagcucuccaguc

SEQ ID NO: 689 - RNA, 17 nt, Artificial Sequence
  Description of Artificial Sequence:  Nucleic Acid
ggcagcucuccagucag

SEQ ID NO: 690 - RNA, 17 nt, Artificial Sequence
  Description of Artificial Sequence:  Nucleic Acid
cagcucuccagucagga

SEQ ID NO: 691 - RNA, 17 nt, Artificial Sequence
  Description of Artificial Sequence:  Nucleic Acid
agcucuccagucaggag

SEQ ID NO: 692 - RNA, 17 nt, Artificial Sequence
  Description of Artificial Sequence:  Nucleic Acid
cuccagucaggaggcau

SEQ ID NO: 693 - RNA, 17 nt, Artificial Sequence
  Description of Artificial Sequence:  Nucleic Acid
caggaggcauaguuuuu

SEQ ID NO: 694 - RNA, 17 nt, Artificial Sequence
  Description of Artificial Sequence:  Nucleic Acid
uagugaacaaucaaagc

SEQ ID NO: 695 - RNA, 17 nt, Artificial Sequence
  Description of Artificial Sequence:  Nucleic Acid
gaacaaucaaagcacuu

SEQ ID NO: 696 - RNA, 17 nt, Artificial Sequence
  Description of Artificial Sequence:  Nucleic Acid
aucaaagcacuuggacu

SEQ ID NO: 697 - RNA, 17 nt, Artificial Sequence
  Description of Artificial Sequence:  Nucleic Acid
caaagcacuuggacucu

SEQ ID NO: 698 - RNA, 17 nt, Artificial Sequence
  Description of Artificial Sequence:  Nucleic Acid
acuuggacucuugcucu

SEQ ID NO: 699 - RNA, 17 nt, Artificial Sequence
  Description of Artificial Sequence:  Nucleic Acid
uuggacucuugcucuuu

SEQ ID NO: 700 - RNA, 17 nt, Artificial Sequence
  Description of Artificial Sequence:  Nucleic Acid
acucuugcucuuucuac

SEQ ID NO: 701 - RNA, 17 nt, Artificial Sequence
  Description of Artificial Sequence:  Nucleic Acid
ucuugcucuuucuacuc

SEQ ID NO: 702 - RNA, 17 nt, Artificial Sequence
  Description of Artificial Sequence:  Nucleic Acid
gcucuuucuacucugaa

SEQ ID NO: 703 - RNA, 17 nt, Artificial Sequence
  Description of Artificial Sequence:  Nucleic Acid
cuuucuacucugaacua

SEQ ID NO: 704 - RNA, 17 nt, Artificial Sequence
  Description of Artificial Sequence:  Nucleic Acid
uucuacucugaacuaau

SEQ ID NO: 705 - RNA, 17 nt, Artificial Sequence
  Description of Artificial Sequence:  Nucleic Acid
cucugaacuaauaaagc

SEQ ID NO: 706 - RNA, 17 nt, Artificial Sequence
  Description of Artificial Sequence:  Nucleic Acid
aauaaagcuguugccaa

SEQ ID NO: 707 - RNA, 17 nt, Artificial Sequence
  Description of Artificial Sequence:  Nucleic Acid
gcuguugccaagcugga

SEQ ID NO: 708 - RNA, 17 nt, Artificial Sequence
  Description of Artificial Sequence:  Nucleic Acid
cuguugccaagcuggac

SEQ ID NO: 709 - RNA, 17 nt, Artificial Sequence
  Description of Artificial Sequence:  Nucleic Acid
ugccaagcuggacggca

SEQ ID NO: 710 - RNA, 17 nt, Artificial Sequence
  Description of Artificial Sequence:  Nucleic Acid
uggacggcacgagcucg

SEQ ID NO: 711 - RNA, 38 nt, Artificial Sequence
  Description of Artificial Sequence:  Nucleic Acid
  misc_feature (31)..(31): n stands for inosine
ugcgaccccugaugaggccguuaggccgaanccccgcc

SEQ ID NO: 712 - RNA, 38 nt, Artificial Sequence
  Description of Artificial Sequence:  Nucleic Acid
  misc_feature (31)..(31): n stands for inosine
ggcccagccugaugaggccguuaggccgaancgacccg

SEQ ID NO: 713 - RNA, 38 nt, Artificial Sequence
  Description of Artificial Sequence:  Nucleic Acid
  misc_feature (31)..(31): n stands for inosine
gcgggccccugaugaggccguuaggccgaancugcgac

SEQ ID NO: 714 - RNA, 38 nt, Artificial Sequence
  Description of Artificial Sequence:  Nucleic Acid
  misc_feature (31)..(31): n stands for inosine
augccgcgcugaugaggccguuaggccgaancccagcu

SEQ ID NO: 715 - RNA, 38 nt, Artificial Sequence
  Description of Artificial Sequence:  Nucleic Acid
  misc_feature (31)..(31): n stands for inosine
caugccgccugaugaggccguuaggccgaangcccagc

SEQ ID NO: 716 - RNA, 38 nt, Artificial Sequence
  Description of Artificial Sequence:  Nucleic Acid
  misc_feature (31)..(31): n stands for inosine
uucguccacugaugaggccguuaggccgaanccgcggg

SEQ ID NO: 717 - RNA, 38 nt, Artificial Sequence
  Description of Artificial Sequence:  Nucleic Acid
  misc_feature (31)..(31): n stands for inosine
gggggaaccugaugaggccguuaggccgaanuucgucc

SEQ ID NO: 718 - RNA, 38 nt, Artificial Sequence
  Description of Artificial Sequence:  Nucleic Acid
  misc_feature (31)..(31): n stands for inosine
gaugagggcugaugaggccguuaggccgaanaacaguu

SEQ ID NO: 719 - RNA, 38 nt, Artificial Sequence
  Description of Artificial Sequence:  Nucleic Acid
  misc_feature (31)..(31): n stands for inosine
agaugaggcugaugaggccguuaggccgaangaacagu

SEQ ID NO: 720 - RNA, 38 nt, Artificial Sequence
  Description of Artificial Sequence:  Nucleic Acid
  misc_feature (31)..(31): n stands for inosine
aagaugagcugaugaggccguuaggccgaanggaacag

SEQ ID NO: 721 - RNA, 38 nt, Artificial Sequence
  Description of Artificial Sequence:  Nucleic Acid
  misc_feature (31)..(31): n stands for inosine
gaagaugacugaugaggccguuaggccgaangggaaca

SEQ ID NO: 722 - RNA, 38 nt, Artificial Sequence
  Description of Artificial Sequence:  Nucleic Acid
  misc_feature (31)..(31): n stands for inosine
ggaagaugcugaugaggccguuaggccgaanggggaac

SEQ ID NO: 723 - RNA, 38 nt, Artificial Sequence
  Description of Artificial Sequence:  Nucleic Acid
  misc_feature (31)..(31): n stands for inosine
cgggaagacugaugaggccguuaggccgaanaggggga

SEQ ID NO: 724 - RNA, 38 nt, Artificial Sequence
  Description of Artificial Sequence:  Nucleic Acid
  misc_feature (31)..(31): n stands for inosine
ugccgggacugaugaggccguuaggccgaanaugaggg

SEQ ID NO: 725 - RNA, 38 nt, Artificial Sequence
  Description of Artificial Sequence:  Nucleic Acid
  misc_feature (31)..(31): n stands for inosine
cucugccgcugaugaggccguuaggccgaanaagauga

SEQ ID NO: 726 - RNA, 38 nt, Artificial Sequence
  Description of Artificial Sequence:  Nucleic Acid
  misc_feature (31)..(31): n stands for inosine
gcucugcccugaugaggccguuaggccgaangaagaug

SEQ ID NO: 727 - RNA, 38 nt, Artificial Sequence
  Description of Artificial Sequence:  Nucleic Acid
  misc_feature (31)..(31): n stands for inosine
ggcugcuccugaugaggccguuaggccgaanccgggaa

SEQ ID NO: 728 - RNA, 38 nt, Artificial Sequence
  Description of Artificial Sequence:  Nucleic Acid
  misc_feature (31)..(31): n stands for inosine
gcuugggccugaugaggccguuaggccgaancucugcc

SEQ ID NO: 729 - RNA, 38 nt, Artificial Sequence
  Description of Artificial Sequence:  Nucleic Acid
  misc_feature (31)..(31): n stands for inosine
gcugcuugcugaugaggccguuaggccgaancugcucu

SEQ ID NO: 730 - RNA, 38 nt, Artificial Sequence
  Description of Artificial Sequence:  Nucleic Acid
  misc_feature (31)..(31): n stands for inosine
cgcugcuucugaugaggccguuaggccgaangcugcuc

SEQ ID NO: 731 - RNA, 38 nt, Artificial Sequence
  Description of Artificial Sequence:  Nucleic Acid
  misc_feature (31)..(31): n stands for inosine
ccgcugcucugaugaggccguuaggccgaanggcugcu

SEQ ID NO: 732 - RNA, 38 nt, Artificial Sequence
  Description of Artificial Sequence:  Nucleic Acid
  misc_feature (31)..(31): n stands for inosine
ugccccgccugaugaggccguuaggccgaancuugggc

SEQ ID NO: 733 - RNA, 38 nt, Artificial Sequence
  Description of Artificial Sequence:  Nucleic Acid
  misc_feature (31)..(31): n stands for inosine
gaagcgcacugaugaggccguuaggccgaanccccgcu

SEQ ID NO: 734 - RNA, 38 nt, Artificial Sequence
  Description of Artificial Sequence:  Nucleic Acid
  misc_feature (31)..(31): n stands for inosine
guagcggacugaugaggccguuaggccgaancgcaugc

SEQ ID NO: 735 - RNA, 38 nt, Artificial Sequence
  Description of Artificial Sequence:  Nucleic Acid
  misc_feature (31)..(31): n stands for inosine
cuuguagccugaugaggccguuaggccgaanaagcgca

SEQ ID NO: 736 - RNA, 38 nt, Artificial Sequence
  Description of Artificial Sequence:  Nucleic Acid
  misc_feature (31)..(31): n stands for inosine
gcacuugucugaugaggccguuaggccgaancggaagc

SEQ ID NO: 737 - RNA, 38 nt, Artificial Sequence
  Description of Artificial Sequence:  Nucleic Acid
  misc_feature (31)..(31): n stands for inosine
cucgcacucugaugaggccguuaggccgaanuagcgga

SEQ ID NO: 738 - RNA, 38 nt, Artificial Sequence
  Description of Artificial Sequence:  Nucleic Acid
  misc_feature (31)..(31): n stands for inosine
gcccgcggcugaugaggccguuaggccgaancgccccu

SEQ ID NO: 739 - RNA, 38 nt, Artificial Sequence
  Description of Artificial Sequence:  Nucleic Acid
  misc_feature (31)..(31): n stands for inosine
cugcccgccugaugaggccguuaggccgaanagcgccc

SEQ ID NO: 740 - RNA, 38 nt, Artificial Sequence
  Description of Artificial Sequence:  Nucleic Acid
  misc_feature (31)..(31): n stands for inosine
ugggaugccugaugaggccguuaggccgaancccgcgg

SEQ ID NO: 741 - RNA, 38 nt, Artificial Sequence
  Description of Artificial Sequence:  Nucleic Acid
  misc_feature (31)..(31): n stands for inosine
gccugggacugaugaggccguuaggccgaancugcccg

SEQ ID NO: 742 - RNA, 38 nt, Artificial Sequence
  Description of Artificial Sequence:  Nucleic Acid
  misc_feature (31)..(31): n stands for inosine
cucgccugcugaugaggccguuaggccgaanaugcugc

SEQ ID NO: 743 - RNA, 38 nt, Artificial Sequence
  Description of Artificial Sequence:  Nucleic Acid
  misc_feature (31)..(31): n stands for inosine
ucucgccucugaugaggccguuaggccgaangaugcug

SEQ ID NO: 744 - RNA, 38 nt, Artificial Sequence
  Description of Artificial Sequence:  Nucleic Acid
  misc_feature (31)..(31): n stands for inosine
cucucgcccugaugaggccguuaggccgaanggaugcu

SEQ ID NO: 745 - RNA, 38 nt, Artificial Sequence
  Description of Artificial Sequence:  Nucleic Acid
  misc_feature (31)..(31): n stands for inosine
gguaucugcugaugaggccguuaggccgaancuccucu

SEQ ID NO: 746 - RNA, 38 nt, Artificial Sequence
  Description of Artificial Sequence:  Nucleic Acid
  misc_feature (31)..(31): n stands for inosine
gugguauccugaugaggccguuaggccgaanugcuccu

SEQ ID NO: 747 - RNA, 38 nt, Artificial Sequence
  Description of Artificial Sequence:  Nucleic Acid
  misc_feature (31)..(31): n stands for inosine
gucuuggucugaugaggccguuaggccgaanuaucugu

SEQ ID NO: 748 - RNA, 38 nt, Artificial Sequence
  Description of Artificial Sequence:  Nucleic Acid
  misc_feature (31)..(31): n stands for inosine
ggucuuggcugaugaggccguuaggccgaanguaucug

SEQ ID NO: 749 - RNA, 38 nt, Artificial Sequence
  Description of Artificial Sequence:  Nucleic Acid
  misc_feature (31)..(31): n stands for inosine
ugggucuucugaugaggccguuaggccgaanugguauc

SEQ ID NO: 750 - RNA, 38 nt, Artificial Sequence
  Description of Artificial Sequence:  Nucleic Acid
  misc_feature (31)..(31): n stands for inosine
gugggucucugaugaggccguuaggccgaangugguau

SEQ ID NO: 751 - RNA, 38 nt, Artificial Sequence
  Description of Artificial Sequence:  Nucleic Acid
  misc_feature (31)..(31): n stands for inosine
guggggugcugaugaggccguuaggccgaanucuuggu

SEQ ID NO: 752 - RNA, 38 nt, Artificial Sequence
  Description of Artificial Sequence:  Nucleic Acid
  misc_feature (31)..(31): n stands for inosine
gguggggucugaugaggccguuaggccgaangucuugg

SEQ ID NO: 753 - RNA, 38 nt, Artificial Sequence
  Description of Artificial Sequence:  Nucleic Acid
  misc_feature (31)..(31): n stands for inosine
ugguggggcugaugaggccguuaggccgaanggucuug

SEQ ID NO: 754 - RNA, 38 nt, Artificial Sequence
  Description of Artificial Sequence:  Nucleic Acid
  misc_feature (31)..(31): n stands for inosine
gaugguggcugaugaggccguuaggccgaanugggucu

SEQ ID NO: 755 - RNA, 38 nt, Artificial Sequence
  Description of Artificial Sequence:  Nucleic Acid
  misc_feature (31)..(31): n stands for inosine
ugauggugcugaugaggccguuaggccgaanguggguc

SEQ ID NO: 756 - RNA, 38 nt, Artificial Sequence
  Description of Artificial Sequence:  Nucleic Acid
  misc_feature (31)..(31): n stands for inosine
uugauggucugaugaggccguuaggccgaanggugggu

SEQ ID NO: 757 - RNA, 38 nt, Artificial Sequence
  Description of Artificial Sequence:  Nucleic Acid
  misc_feature (31)..(31): n stands for inosine
cuugauggcugaugaggccguuaggccgaanggguggg

SEQ ID NO: 758 - RNA, 38 nt, Artificial Sequence
  Description of Artificial Sequence:  Nucleic Acid
  misc_feature (31)..(31): n stands for inosine
aucuugaucugaugaggccguuaggccgaanuggggug

SEQ ID NO: 759 - RNA, 38 nt, Artificial Sequence
  Description of Artificial Sequence:  Nucleic Acid
  misc_feature (31)..(31): n stands for inosine
gaucuugacugaugaggccguuaggccgaanguggggu

SEQ ID NO: 760 - RNA, 38 nt, Artificial Sequence
  Description of Artificial Sequence:  Nucleic Acid
  misc_feature (31)..(31): n stands for inosine
auugaucucugaugaggccguuaggccgaanauggugg

SEQ ID NO: 761 - RNA, 38 nt, Artificial Sequence
  Description of Artificial Sequence:  Nucleic Acid
  misc_feature (31)..(31): n stands for inosine
guagccaucugaugaggccguuaggccgaanaucuuga

SEQ ID NO: 762 - RNA, 38 nt, Artificial Sequence
  Description of Artificial Sequence:  Nucleic Acid
  misc_feature (31)..(31): n stands for inosine
uccugugucugaugaggccguuaggccgaanccauuga

SEQ ID NO: 763 - RNA, 38 nt, Artificial Sequence
  Description of Artificial Sequence:  Nucleic Acid
  misc_feature (31)..(31): n stands for inosine
ugguccugcugaugaggccguuaggccgaanuagccau

SEQ ID NO: 764 - RNA, 38 nt, Artificial Sequence
  Description of Artificial Sequence:  Nucleic Acid
  misc_feature (31)..(31): n stands for inosine
ccuggucccugaugaggccguuaggccgaanuguagcc

SEQ ID NO: 765 - RNA, 38 nt, Artificial Sequence
  Description of Artificial Sequence:  Nucleic Acid
  misc_feature (31)..(31): n stands for inosine
cugucccucugaugaggccguuaggccgaanuccugug

SEQ ID NO: 766 - RNA, 38 nt, Artificial Sequence
  Description of Artificial Sequence:  Nucleic Acid
  misc_feature (31)..(31): n stands for inosine
acuguccccugaugaggccguuaggccgaanguccugu

SEQ ID NO: 767 - RNA, 38 nt, Artificial Sequence
  Description of Artificial Sequence:  Nucleic Acid
  misc_feature (31)..(31): n stands for inosine
augcgcaccugaugaggccguuaggccgaanucccugg

SEQ ID NO: 768 - RNA, 38 nt, Artificial Sequence
  Description of Artificial Sequence:  Nucleic Acid
  misc_feature (31)..(31): n stands for inosine
cagggagacugaugaggccguuaggccgaancgcacug

SEQ ID NO: 769 - RNA, 38 nt, Artificial Sequence
  Description of Artificial Sequence:  Nucleic Acid
  misc_feature (31)..(31): n stands for inosine
gaccagggcugaugaggccguuaggccgaanaugcgca

SEQ ID NO: 770 - RNA, 38 nt, Artificial Sequence
  Description of Artificial Sequence:  Nucleic Acid
  misc_feature (31)..(31): n stands for inosine
gugaccagcugaugaggccguuaggccgaanagaugcg

SEQ ID NO: 771 - RNA, 38 nt, Artificial Sequence
  Description of Artificial Sequence:  Nucleic Acid
  misc_feature (31)..(31): n stands for inosine
ggugaccacugaugaggccguuaggccgaangagaugc

SEQ ID NO: 772 - RNA, 38 nt, Artificial Sequence
  Description of Artificial Sequence:  Nucleic Acid
  misc_feature (31)..(31): n stands for inosine
uggugacccugaugaggccguuaggccgaanggagaug

SEQ ID NO: 773 - RNA, 38 nt, Artificial Sequence
  Description of Artificial Sequence:  Nucleic Acid
  misc_feature (31)..(31): n stands for inosine
guccuuggcugaugaggccguuaggccgaanaccaggg

SEQ ID NO: 774 - RNA, 38 nt, Artificial Sequence
  Description of Artificial Sequence:  Nucleic Acid
  misc_feature (31)..(31): n stands for inosine
ggguccuucugaugaggccguuaggccgaanugaccag

SEQ ID NO: 775 - RNA, 38 nt, Artificial Sequence
  Description of Artificial Sequence:  Nucleic Acid
  misc_feature (31)..(31): n stands for inosine
aggguccucugaugaggccguuaggccgaangugacca

SEQ ID NO: 776 - RNA, 38 nt, Artificial Sequence
  Description of Artificial Sequence:  Nucleic Acid
  misc_feature (31)..(31): n stands for inosine
gugaggagcugaugaggccguuaggccgaanuccuugg

SEQ ID NO: 777 - RNA, 38 nt, Artificial Sequence
  Description of Artificial Sequence:  Nucleic Acid
  misc_feature (31)..(31): n stands for inosine
ggugaggacugaugaggccguuaggccgaanguccuug

SEQ ID NO: 778 - RNA, 38 nt, Artificial Sequence
  Description of Artificial Sequence:  Nucleic Acid
  misc_feature (31)..(31): n stands for inosine
cggugaggcugaugaggccguuaggccgaangguccuu

SEQ ID NO: 779 - RNA, 38 nt, Artificial Sequence
  Description of Artificial Sequence:  Nucleic Acid
  misc_feature (31)..(31): n stands for inosine
gccggugacugaugaggccguuaggccgaanagggucc

SEQ ID NO: 780 - RNA, 38 nt, Artificial Sequence
  Description of Artificial Sequence:  Nucleic Acid
  misc_feature (31)..(31): n stands for inosine
ggccggugcugaugaggccguuaggccgaangaggguc

SEQ ID NO: 781 - RNA, 38 nt, Artificial Sequence
  Description of Artificial Sequence:  Nucleic Acid
  misc_feature (31)..(31): n stands for inosine
gaggccggcugaugaggccguuaggccgaanaggaggg

SEQ ID NO: 782 - RNA, 38 nt, Artificial Sequence
  Description of Artificial Sequence:  Nucleic Acid
  misc_feature (31)..(31): n stands for inosine
gugaggcccugaugaggccguuaggccgaanugaggag

SEQ ID NO: 783 - RNA, 38 nt, Artificial Sequence
  Description of Artificial Sequence:  Nucleic Acid
  misc_feature (31)..(31): n stands for inosine
gggggugacugaugaggccguuaggccgaanccgguga

SEQ ID NO: 784 - RNA, 38 nt, Artificial Sequence
  Description of Artificial Sequence:  Nucleic Acid
  misc_feature (31)..(31): n stands for inosine
ugggggugcugaugaggccguuaggccgaangccggug

SEQ ID NO: 785 - RNA, 38 nt, Artificial Sequence
  Description of Artificial Sequence:  Nucleic Acid
  misc_feature (31)..(31): n stands for inosine
cgugggggcugaugaggccguuaggccgaanaggccgg

SEQ ID NO: 786 - RNA, 38 nt, Artificial Sequence
  Description of Artificial Sequence:  Nucleic Acid
  misc_feature (31)..(31): n stands for inosine
cucgugggcugaugaggccguuaggccgaanugaggcc

SEQ ID NO: 787 - RNA, 38 nt, Artificial Sequence
  Description of Artificial Sequence:  Nucleic Acid
  misc_feature (31)..(31): n stands for inosine
gcucguggcugaugaggccguuaggccgaangugaggc

SEQ ID NO: 788 - RNA, 38 nt, Artificial Sequence
  Description of Artificial Sequence:  Nucleic Acid
  misc_feature (31)..(31): n stands for inosine
agcucgugcugaugaggccguuaggccgaanggugagg

SEQ ID NO: 789 - RNA, 38 nt, Artificial Sequence
  Description of Artificial Sequence:  Nucleic Acid
  misc_feature (31)..(31): n stands for inosine
aagcucgucugaugaggccguuaggccgaangggugag

SEQ ID NO: 790 - RNA, 38 nt, Artificial Sequence
  Description of Artificial Sequence:  Nucleic Acid
  misc_feature (31)..(31): n stands for inosine
caagcucgcugaugaggccguuaggccgaangggguga

SEQ ID NO: 791 - RNA, 38 nt, Artificial Sequence
  Description of Artificial Sequence:  Nucleic Acid
  misc_feature (31)..(31): n stands for inosine
uuccuacacugaugaggccguuaggccgaancucgugg

SEQ ID NO: 792 - RNA, 38 nt, Artificial Sequence
  Description of Artificial Sequence:  Nucleic Acid
  misc_feature (31)..(31): n stands for inosine
aucccggccugaugaggccguuaggccgaanuccuuuc

SEQ ID NO: 793 - RNA, 38 nt, Artificial Sequence
  Description of Artificial Sequence:  Nucleic Acid
  misc_feature (31)..(31): n stands for inosine
gccauccccugaugaggccguuaggccgaancaguccu

SEQ ID NO: 794 - RNA, 38 nt, Artificial Sequence
  Description of Artificial Sequence:  Nucleic Acid
  misc_feature (31)..(31): n stands for inosine
cucauagacugaugaggccguuaggccgaanccauccc

SEQ ID NO: 795 - RNA, 38 nt, Artificial Sequence
  Description of Artificial Sequence:  Nucleic Acid
  misc_feature (31)..(31): n stands for inosine
agccucaucugaugaggccguuaggccgaanaagccau

SEQ ID NO: 796 - RNA, 38 nt, Artificial Sequence
  Description of Artificial Sequence:  Nucleic Acid
  misc_feature (31)..(31): n stands for inosine
cagagcuccugaugaggccguuaggccgaanccucaua

SEQ ID NO: 797 - RNA, 38 nt, Artificial Sequence
  Description of Artificial Sequence:  Nucleic Acid
  misc_feature (31)..(31): n stands for inosine
ccgggcagcugaugaggccguuaggccgaancucagcc

SEQ ID NO: 798 - RNA, 38 nt, Artificial Sequence
  Description of Artificial Sequence:  Nucleic Acid
  misc_feature (31)..(31): n stands for inosine
guccgggccugaugaggccguuaggccgaanagcucag

SEQ ID NO: 799 - RNA, 38 nt, Artificial Sequence
  Description of Artificial Sequence:  Nucleic Acid
  misc_feature (31)..(31): n stands for inosine
gcgguccgcugaugaggccguuaggccgaancagagcu

SEQ ID NO: 800 - RNA, 38 nt, Artificial Sequence
  Description of Artificial Sequence:  Nucleic Acid
  misc_feature (31)..(31): n stands for inosine
agcggucccugaugaggccguuaggccgaangcagagc

SEQ ID NO: 801 - RNA, 38 nt, Artificial Sequence
  Description of Artificial Sequence:  Nucleic Acid
  misc_feature (31)..(31): n stands for inosine
gaugcagccugaugaggccguuaggccgaanuccgggc

SEQ ID NO: 802 - RNA, 38 nt, Artificial Sequence
  Description of Artificial Sequence:  Nucleic Acid
  misc_feature (31)..(31): n stands for inosine
guggaugccugaugaggccguuaggccgaancgguccg

SEQ ID NO: 803 - RNA, 38 nt, Artificial Sequence
  Description of Artificial Sequence:  Nucleic Acid
  misc_feature (31)..(31): n stands for inosine
acuguggacugaugaggccguuaggccgaancagcggu

SEQ ID NO: 804 - RNA, 38 nt, Artificial Sequence
  Description of Artificial Sequence:  Nucleic Acid
  misc_feature (31)..(31): n stands for inosine
gaaacugucugaugaggccguuaggccgaanaugcagc

SEQ ID NO: 805 - RNA, 38 nt, Artificial Sequence
  Description of Artificial Sequence:  Nucleic Acid
  misc_feature (31)..(31): n stands for inosine
ggaaacugcugaugaggccguuaggccgaangaugcag

SEQ ID NO: 806 - RNA, 38 nt, Artificial Sequence
  Description of Artificial Sequence:  Nucleic Acid
  misc_feature (31)..(31): n stands for inosine
cuggaaaccugaugaggccguuaggccgaanuggaugc

SEQ ID NO: 807 - RNA, 38 nt, Artificial Sequence
  Description of Artificial Sequence:  Nucleic Acid
  misc_feature (31)..(31): n stands for inosine
cagguucucugaugaggccguuaggccgaanaaacugu

SEQ ID NO: 808 - RNA, 38 nt, Artificial Sequence
  Description of Artificial Sequence:  Nucleic Acid
  misc_feature (31)..(31): n stands for inosine
ccagguuccugaugaggccguuaggccgaangaaacug

SEQ ID NO: 809 - RNA, 38 nt, Artificial Sequence
  Description of Artificial Sequence:  Nucleic Acid
  misc_feature (31)..(31): n stands for inosine
gauucccacugaugaggccguuaggccgaanuucugga

SEQ ID NO: 810 - RNA, 38 nt, Artificial Sequence
  Description of Artificial Sequence:  Nucleic Acid
  misc_feature (31)..(31): n stands for inosine
ggauuccccugaugaggccguuaggccgaanguucugg

SEQ ID NO: 811 - RNA, 38 nt, Artificial Sequence
  Description of Artificial Sequence:  Nucleic Acid
  misc_feature (31)..(31): n stands for inosine
cacacacucugaugaggccguuaggccgaanauuccca

SEQ ID NO: 812 - RNA, 38 nt, Artificial Sequence
  Description of Artificial Sequence:  Nucleic Acid
  misc_feature (31)..(31): n stands for inosine
ucacacaccugaugaggccguuaggccgaangauuccc

SEQ ID NO: 813 - RNA, 38 nt, Artificial Sequence
  Description of Artificial Sequence:  Nucleic Acid
  misc_feature (31)..(31): n stands for inosine
cugcuccacugaugaggccguuaggccgaanucccgcu

SEQ ID NO: 814 - RNA, 38 nt, Artificial Sequence
  Description of Artificial Sequence:  Nucleic Acid
  misc_feature (31)..(31): n stands for inosine
ccugcucccugaugaggccguuaggccgaangucccgc

SEQ ID NO: 815 - RNA, 38 nt, Artificial Sequence
  Description of Artificial Sequence:  Nucleic Acid
  misc_feature (31)..(31): n stands for inosine
ugauagcccugaugaggccguuaggccgaancuccagg

SEQ ID NO: 816 - RNA, 38 nt, Artificial Sequence
  Description of Artificial Sequence:  Nucleic Acid
  misc_feature (31)..(31): n stands for inosine
ugacugaucugaugaggccguuaggccgaanccugcuc

SEQ ID NO: 817 - RNA, 38 nt, Artificial Sequence
  Description of Artificial Sequence:  Nucleic Acid
  misc_feature (31)..(31): n stands for inosine
gcgcugaccugaugaggccguuaggccgaanauagccu

SEQ ID NO: 818 - RNA, 38 nt, Artificial Sequence
  Description of Artificial Sequence:  Nucleic Acid
  misc_feature (31)..(31): n stands for inosine
ggaugcgccugaugaggccguuaggccgaanacugaua

SEQ ID NO: 819 - RNA, 38 nt, Artificial Sequence
  Description of Artificial Sequence:  Nucleic Acid
  misc_feature (31)..(31): n stands for inosine
ggucuggacugaugaggccguuaggccgaancgcugac

SEQ ID NO: 820 - RNA, 38 nt, Artificial Sequence
  Description of Artificial Sequence:  Nucleic Acid
  misc_feature (31)..(31): n stands for inosine
guuggucucugaugaggccguuaggccgaanaugcgcu

SEQ ID NO: 821 - RNA, 38 nt, Artificial Sequence
  Description of Artificial Sequence:  Nucleic Acid
  misc_feature (31)..(31): n stands for inosine
uguugguccugaugaggccguuaggccgaangaugcgc

SEQ ID NO: 822 - RNA, 38 nt, Artificial Sequence
  Description of Artificial Sequence:  Nucleic Acid
  misc_feature (31)..(31): n stands for inosine
uuguuguucugaugaggccguuaggccgaanucuggau

SEQ ID NO: 823 - RNA, 38 nt, Artificial Sequence
  Description of Artificial Sequence:  Nucleic Acid
  misc_feature (31)..(31): n stands for inosine
guuguugucugaugaggccguuaggccgaangucugga

SEQ ID NO: 824 - RNA, 38 nt, Artificial Sequence
  Description of Artificial Sequence:  Nucleic Acid
  misc_feature (31)..(31): n stands for inosine
gggguugucugaugaggccguuaggccgaanuuggucu

SEQ ID NO: 825 - RNA, 38 nt, Artificial Sequence
  Description of Artificial Sequence:  Nucleic Acid
  misc_feature (31)..(31): n stands for inosine
gaaggggucugaugaggccguuaggccgaanuuguugg

SEQ ID NO: 826 - RNA, 38 nt, Artificial Sequence
  Description of Artificial Sequence:  Nucleic Acid
  misc_feature (31)..(31): n stands for inosine
uuggaaggcugaugaggccguuaggccgaanuuguugu

SEQ ID NO: 827 - RNA, 38 nt, Artificial Sequence
  Description of Artificial Sequence:  Nucleic Acid
  misc_feature (31)..(31): n stands for inosine
cuuggaagcugaugaggccguuaggccgaanguuguug

SEQ ID NO: 828 - RNA, 38 nt, Artificial Sequence
  Description of Artificial Sequence:  Nucleic Acid
  misc_feature (31)..(31): n stands for inosine
acuuggaacugaugaggccguuaggccgaangguuguu

SEQ ID NO: 829 - RNA, 38 nt, Artificial Sequence
  Description of Artificial Sequence:  Nucleic Acid
  misc_feature (31)..(31): n stands for inosine
aacuuggacugaugaggccguuaggccgaanggguugu

SEQ ID NO: 830 - RNA, 38 nt, Artificial Sequence
  Description of Artificial Sequence:  Nucleic Acid
  misc_feature (31)..(31): n stands for inosine
aggaacuucugaugaggccguuaggccgaanaaggggu

SEQ ID NO: 831 - RNA, 38 nt, Artificial Sequence
  Description of Artificial Sequence:  Nucleic Acid
  misc_feature (31)..(31): n stands for inosine
uaggaacucugaugaggccguuaggccgaangaagggg

SEQ ID NO: 832 - RNA, 38 nt, Artificial Sequence
  Description of Artificial Sequence:  Nucleic Acid
  misc_feature (31)..(31): n stands for inosine
cuucuauacugaugaggccguuaggccgaanaacuugg

SEQ ID NO: 833 - RNA, 38 nt, Artificial Sequence
  Description of Artificial Sequence:  Nucleic Acid
  misc_feature (31)..(31): n stands for inosine
ucuucuaucugaugaggccguuaggccgaangaacuug

SEQ ID NO: 834 - RNA, 38 nt, Artificial Sequence
  Description of Artificial Sequence:  Nucleic Acid
  misc_feature (31)..(31): n stands for inosine
ccccacgccugaugaggccguuaggccgaancucuucu

SEQ ID NO: 835 - RNA, 38 nt, Artificial Sequence
  Description of Artificial Sequence:  Nucleic Acid
  misc_feature (31)..(31): n stands for inosine
caggucgucugaugaggccguuaggccgaanuccccac

SEQ ID NO: 836 - RNA, 38 nt, Artificial Sequence
  Description of Artificial Sequence:  Nucleic Acid
  misc_feature (31)..(31): n stands for inosine
agcauucacugaugaggccguuaggccgaanucguagu

SEQ ID NO: 837 - RNA, 38 nt, Artificial Sequence
  Description of Artificial Sequence:  Nucleic Acid
  misc_feature (31)..(31): n stands for inosine
cagcauuccugaugaggccguuaggccgaangucguag

SEQ ID NO: 838 - RNA, 38 nt, Artificial Sequence
  Description of Artificial Sequence:  Nucleic Acid
  misc_feature (31)..(31): n stands for inosine
agccgcaccugaugaggccguuaggccgaancauucag

SEQ ID NO: 839 - RNA, 38 nt, Artificial Sequence
  Description of Artificial Sequence:  Nucleic Acid
  misc_feature (31)..(31): n stands for inosine
ggaagcagcugaugaggccguuaggccgaanccgcaca

SEQ ID NO: 840 - RNA, 38 nt, Artificial Sequence
  Description of Artificial Sequence:  Nucleic Acid
  misc_feature (31)..(31): n stands for inosine
cuggaagccugaugaggccguuaggccgaanagccgca

SEQ ID NO: 841 - RNA, 38 nt, Artificial Sequence
  Description of Artificial Sequence:  Nucleic Acid
  misc_feature (31)..(31): n stands for inosine
caccuggacugaugaggccguuaggccgaancagagcc

SEQ ID NO: 842 - RNA, 38 nt, Artificial Sequence
  Description of Artificial Sequence:  Nucleic Acid
  misc_feature (31)..(31): n stands for inosine
ugucaccucugaugaggccguuaggccgaanaagcaga

SEQ ID NO: 843 - RNA, 38 nt, Artificial Sequence
  Description of Artificial Sequence:  Nucleic Acid
  misc_feature (31)..(31): n stands for inosine
cugucacccugaugaggccguuaggccgaangaagcag

SEQ ID NO: 844 - RNA, 38 nt, Artificial Sequence
  Description of Artificial Sequence:  Nucleic Acid
  misc_feature (31)..(31): n stands for inosine
ucccgcaccugaugaggccguuaggccgaanucaccug

SEQ ID NO: 845 - RNA, 38 nt, Artificial Sequence
  Description of Artificial Sequence:  Nucleic Acid
  misc_feature (31)..(31): n stands for inosine
gccugaugcugaugaggccguuaggccgaanucccgca

SEQ ID NO: 846 - RNA, 38 nt, Artificial Sequence
  Description of Artificial Sequence:  Nucleic Acid
  misc_feature (31)..(31): n stands for inosine
ugccugaucugaugaggccguuaggccgaangucccgc

SEQ ID NO: 847 - RNA, 38 nt, Artificial Sequence
  Description of Artificial Sequence:  Nucleic Acid
  misc_feature (31)..(31): n stands for inosine
cugccugacugaugaggccguuaggccgaanggucccg

SEQ ID NO: 848 - RNA, 38 nt, Artificial Sequence
  Description of Artificial Sequence:  Nucleic Acid
  misc_feature (31)..(31): n stands for inosine
ggccugcccugaugaggccguuaggccgaanauggguc

SEQ ID NO: 849 - RNA, 38 nt, Artificial Sequence
  Description of Artificial Sequence:  Nucleic Acid
  misc_feature (31)..(31): n stands for inosine
gaggggcccugaugaggccguuaggccgaanccugaug

SEQ ID NO: 850 - RNA, 38 nt, Artificial Sequence
  Description of Artificial Sequence:  Nucleic Acid
  misc_feature (31)..(31): n stands for inosine
ggcggaggcugaugaggccguuaggccgaanccugccu

SEQ ID NO: 851 - RNA, 38 nt, Artificial Sequence
  Description of Artificial Sequence:  Nucleic Acid
  misc_feature (31)..(31): n stands for inosine
aggcggagcugaugaggccguuaggccgaangccugcc

SEQ ID NO: 852 - RNA, 38 nt, Artificial Sequence
  Description of Artificial Sequence:  Nucleic Acid
  misc_feature (31)..(31): n stands for inosine
caggcggacugaugaggccguuaggccgaanggccugc

SEQ ID NO: 853 - RNA, 38 nt, Artificial Sequence
  Description of Artificial Sequence:  Nucleic Acid
  misc_feature (31)..(31): n stands for inosine
gcaggcggcugaugaggccguuaggccgaangggccug

SEQ ID NO: 854 - RNA, 38 nt, Artificial Sequence
  Description of Artificial Sequence:  Nucleic Acid
  misc_feature (31)..(31): n stands for inosine
cggcaggccugaugaggccguuaggccgaanaggggcc

SEQ ID NO: 855 - RNA, 38 nt, Artificial Sequence
  Description of Artificial Sequence:  Nucleic Acid
  misc_feature (31)..(31): n stands for inosine
aggcggcacugaugaggccguuaggccgaancggaggg

SEQ ID NO: 856 - RNA, 38 nt, Artificial Sequence
  Description of Artificial Sequence:  Nucleic Acid
  misc_feature (31)..(31): n stands for inosine
caggcggccugaugaggccguuaggccgaangcggagg

SEQ ID NO: 857 - RNA, 38 nt, Artificial Sequence
  Description of Artificial Sequence:  Nucleic Acid
  misc_feature (31)..(31): n stands for inosine
ggacaggccugaugaggccguuaggccgaancaggcgg

SEQ ID NO: 858 - RNA, 38 nt, Artificial Sequence
  Description of Artificial Sequence:  Nucleic Acid
  misc_feature (31)..(31): n stands for inosine
aaaggacacugaugaggccguuaggccgaancggcagg

SEQ ID NO: 859 - RNA, 38 nt, Artificial Sequence
  Description of Artificial Sequence:  Nucleic Acid
  misc_feature (31)..(31): n stands for inosine
gaaaggaccugaugaggccguuaggccgaangcggcag

SEQ ID NO: 860 - RNA, 38 nt, Artificial Sequence
  Description of Artificial Sequence:  Nucleic Acid
  misc_feature (31)..(31): n stands for inosine
augagaaacugaugaggccguuaggccgaanacaggcg

SEQ ID NO: 861 - RNA, 38 nt, Artificial Sequence
  Description of Artificial Sequence:  Nucleic Acid
  misc_feature (31)..(31): n stands for inosine
gaugagaacugaugaggccguuaggccgaangacaggc

SEQ ID NO: 862 - RNA, 38 nt, Artificial Sequence
  Description of Artificial Sequence:  Nucleic Acid
  misc_feature (31)..(31): n stands for inosine
augggaugcugaugaggccguuaggccgaanaaaggac

SEQ ID NO: 863 - RNA, 38 nt, Artificial Sequence
  Description of Artificial Sequence:  Nucleic Acid
  misc_feature (31)..(31): n stands for inosine
agaugggacugaugaggccguuaggccgaanagaaagg

SEQ ID NO: 864 - RNA, 38 nt, Artificial Sequence
  Description of Artificial Sequence:  Nucleic Acid
  misc_feature (31)..(31): n stands for inosine
caaagaugcugaugaggccguuaggccgaanaugagaa

SEQ ID NO: 865 - RNA, 38 nt, Artificial Sequence
  Description of Artificial Sequence:  Nucleic Acid
  misc_feature (31)..(31): n stands for inosine
ucaaagaucugaugaggccguuaggccgaangaugaga

SEQ ID NO: 866 - RNA, 38 nt, Artificial Sequence
  Description of Artificial Sequence:  Nucleic Acid
  misc_feature (31)..(31): n stands for inosine
gucaaagacugaugaggccguuaggccgaanggaugag

SEQ ID NO: 867 - RNA, 38 nt, Artificial Sequence
  Description of Artificial Sequence:  Nucleic Acid
  misc_feature (31)..(31): n stands for inosine
auugucaacugaugaggccguuaggccgaanaugggau

SEQ ID NO: 868 - RNA, 38 nt, Artificial Sequence
  Description of Artificial Sequence:  Nucleic Acid
  misc_feature (31)..(31): n stands for inosine
ggcacgaucugaugaggccguuaggccgaanucaaaga

SEQ ID NO: 869 - RNA, 38 nt, Artificial Sequence
  Description of Artificial Sequence:  Nucleic Acid
  misc_feature (31)..(31): n stands for inosine
guguugggcugaugaggccguuaggccgaancacgauu

SEQ ID NO: 870 - RNA, 38 nt, Artificial Sequence
  Description of Artificial Sequence:  Nucleic Acid
  misc_feature (31)..(31): n stands for inosine
aguguuggcugaugaggccguuaggccgaangcacgau

SEQ ID NO: 871 - RNA, 38 nt, Artificial Sequence
  Description of Artificial Sequence:  Nucleic Acid
  misc_feature (31)..(31): n stands for inosine
caguguugcugaugaggccguuaggccgaanggcacga

SEQ ID NO: 872 - RNA, 38 nt, Artificial Sequence
  Description of Artificial Sequence:  Nucleic Acid
  misc_feature (31)..(31): n stands for inosine
gcaguguucugaugaggccguuaggccgaangggcacg

SEQ ID NO: 873 - RNA, 38 nt, Artificial Sequence
  Description of Artificial Sequence:  Nucleic Acid
  misc_feature (31)..(31): n stands for inosine
ggcagugucugaugaggccguuaggccgaanggggcac

SEQ ID NO: 874 - RNA, 38 nt, Artificial Sequence
  Description of Artificial Sequence:  Nucleic Acid
  misc_feature (31)..(31): n stands for inosine
cucggcagcugaugaggccguuaggccgaanuuggggg

SEQ ID NO: 875 - RNA, 38 nt, Artificial Sequence
  Description of Artificial Sequence:  Nucleic Acid
  misc_feature (31)..(31): n stands for inosine
agcucggccugaugaggccguuaggccgaanuguuggg

SEQ ID NO: 876 - RNA, 38 nt, Artificial Sequence
  Description of Artificial Sequence:  Nucleic Acid
  misc_feature (31)..(31): n stands for inosine
uugagcuccugaugaggccguuaggccgaancaguguu

SEQ ID NO: 877 - RNA, 38 nt, Artificial Sequence
  Description of Artificial Sequence:  Nucleic Acid
  misc_feature (31)..(31): n stands for inosine
agaucuugcugaugaggccguuaggccgaancucggca

SEQ ID NO: 878 - RNA, 38 nt, Artificial Sequence
  Description of Artificial Sequence:  Nucleic Acid
  misc_feature (31)..(31): n stands for inosine
gcagaucucugaugaggccguuaggccgaanagcucgg

SEQ ID NO: 879 - RNA, 38 nt, Artificial Sequence
  Description of Artificial Sequence:  Nucleic Acid
  misc_feature (31)..(31): n stands for inosine
cacucggccugaugaggccguuaggccgaanaucuuga

SEQ ID NO: 880 - RNA, 38 nt, Artificial Sequence
  Description of Artificial Sequence:  Nucleic Acid
  misc_feature (31)..(31): n stands for inosine
guucacuccugaugaggccguuaggccgaancagaucu

SEQ ID NO: 881 - RNA, 38 nt, Artificial Sequence
  Description of Artificial Sequence:  Nucleic Acid
  misc_feature (31)..(31): n stands for inosine
agaguuuccugaugaggccguuaggccgaanuucacuc

SEQ ID NO: 882 - RNA, 38 nt, Artificial Sequence
  Description of Artificial Sequence:  Nucleic Acid
  misc_feature (31)..(31): n stands for inosine
gcugccagcugaugaggccguuaggccgaanuuucggu

SEQ ID NO: 883 - RNA, 38 nt, Artificial Sequence
  Description of Artificial Sequence:  Nucleic Acid
  misc_feature (31)..(31): n stands for inosine
cagcugcccugaugaggccguuaggccgaanaguuucg

SEQ ID NO: 884 - RNA, 38 nt, Artificial Sequence
  Description of Artificial Sequence:  Nucleic Acid
  misc_feature (31)..(31): n stands for inosine
gaggcagccugaugaggccguuaggccgaanccagagu

SEQ ID NO: 885 - RNA, 38 nt, Artificial Sequence
  Description of Artificial Sequence:  Nucleic Acid
  misc_feature (31)..(31): n stands for inosine
accgaggccugaugaggccguuaggccgaancugccag

SEQ ID NO: 886 - RNA, 38 nt, Artificial Sequence
  Description of Artificial Sequence:  Nucleic Acid
  misc_feature (31)..(31): n stands for inosine
cccaccgacugaugaggccguuaggccgaancagcugc

SEQ ID NO: 887 - RNA, 38 nt, Artificial Sequence
  Description of Artificial Sequence:  Nucleic Acid
  misc_feature (31)..(31): n stands for inosine
ccccaccgcugaugaggccguuaggccgaangcagcug

SEQ ID NO: 888 - RNA, 38 nt, Artificial Sequence
  Description of Artificial Sequence:  Nucleic Acid
  misc_feature (31)..(31): n stands for inosine
caguaggacugaugaggccguuaggccgaanaucucau

SEQ ID NO: 889 - RNA, 38 nt, Artificial Sequence
  Description of Artificial Sequence:  Nucleic Acid
  misc_feature (31)..(31): n stands for inosine
acacaguacugaugaggccguuaggccgaanaagaucu

SEQ ID NO: 890 - RNA, 38 nt, Artificial Sequence
  Description of Artificial Sequence:  Nucleic Acid
  misc_feature (31)..(31): n stands for inosine
cacacagucugaugaggccguuaggccgaangaagauc

SEQ ID NO: 891 - RNA, 38 nt, Artificial Sequence
  Description of Artificial Sequence:  Nucleic Acid
  misc_feature (31)..(31): n stands for inosine
ugucacaccugaugaggccguuaggccgaanuaggaag

SEQ ID NO: 892 - RNA, 38 nt, Artificial Sequence
  Description of Artificial Sequence:  Nucleic Acid
  misc_feature (31)..(31): n stands for inosine
cugcaccucugaugaggccguuaggccgaanucacaca

SEQ ID NO: 893 - RNA, 38 nt, Artificial Sequence
  Description of Artificial Sequence:  Nucleic Acid
  misc_feature (31)..(31): n stands for inosine
ccucuuuccugaugaggccguuaggccgaancaccuug

SEQ ID NO: 894 - RNA, 38 nt, Artificial Sequence
  Description of Artificial Sequence:  Nucleic Acid
  misc_feature (31)..(31): n stands for inosine
caccucaacugaugaggccguuaggccgaanuccucuu

SEQ ID NO: 895 - RNA, 38 nt, Artificial Sequence
  Description of Artificial Sequence:  Nucleic Acid
  misc_feature (31)..(31): n stands for inosine
uggucccgcugaugaggccguuaggccgaanaaauaca

SEQ ID NO: 896 - RNA, 38 nt, Artificial Sequence
  Description of Artificial Sequence:  Nucleic Acid
  misc_feature (31)..(31): n stands for inosine
cccagccucugaugaggccguuaggccgaanucccgug

SEQ ID NO: 897 - RNA, 38 nt, Artificial Sequence
  Description of Artificial Sequence:  Nucleic Acid
  misc_feature (31)..(31): n stands for inosine
ucccagcccugaugaggccguuaggccgaangucccgu

SEQ ID NO: 898 - RNA, 38 nt, Artificial Sequence
  Description of Artificial Sequence:  Nucleic Acid
  misc_feature (31)..(31): n stands for inosine
ggccuccccugaugaggccguuaggccgaanccugguc

SEQ ID NO: 899 - RNA, 38 nt, Artificial Sequence
  Description of Artificial Sequence:  Nucleic Acid
  misc_feature (31)..(31): n stands for inosine
gagccucgcugaugaggccguuaggccgaanccuccca

SEQ ID NO: 900 - RNA, 38 nt, Artificial Sequence
  Description of Artificial Sequence:  Nucleic Acid
  misc_feature (31)..(31): n stands for inosine
ggagccuccugaugaggccguuaggccgaangccuccc

SEQ ID NO: 901 - RNA, 38 nt, Artificial Sequence
  Description of Artificial Sequence:  Nucleic Acid
  misc_feature (31)..(31): n stands for inosine
cgaaaaggcugaugaggccguuaggccgaanccucggg

SEQ ID NO: 902 - RNA, 38 nt, Artificial Sequence
  Description of Artificial Sequence:  Nucleic Acid
  misc_feature (31)..(31): n stands for inosine
ugcgaaaacugaugaggccguuaggccgaanagccucg

SEQ ID NO: 903 - RNA, 38 nt, Artificial Sequence
  Description of Artificial Sequence:  Nucleic Acid
  misc_feature (31)..(31): n stands for inosine
uugcgaaacugaugaggccguuaggccgaangagccuc

SEQ ID NO: 904 - RNA, 38 nt, Artificial Sequence
  Description of Artificial Sequence:  Nucleic Acid
  misc_feature (31)..(31): n stands for inosine
caucagcucugaugaggccguuaggccgaancgaaaag

SEQ ID NO: 905 - RNA, 38 nt, Artificial Sequence
  Description of Artificial Sequence:  Nucleic Acid
  misc_feature (31)..(31): n stands for inosine
ugcacauccugaugaggccguuaggccgaancuugcga

SEQ ID NO: 906 - RNA, 38 nt, Artificial Sequence
  Description of Artificial Sequence:  Nucleic Acid
  misc_feature (31)..(31): n stands for inosine
cuugucggcugaugaggccguuaggccgaancacauca

SEQ ID NO: 907 - RNA, 38 nt, Artificial Sequence
  Description of Artificial Sequence:  Nucleic Acid
  misc_feature (31)..(31): n stands for inosine
cacuuguccugaugaggccguuaggccgaanugcacau

SEQ ID NO: 908 - RNA, 38 nt, Artificial Sequence
  Description of Artificial Sequence:  Nucleic Acid
  misc_feature (31)..(31): n stands for inosine
uggccacucugaugaggccguuaggccgaanucggugc

SEQ ID NO: 909 - RNA, 38 nt, Artificial Sequence
  Description of Artificial Sequence:  Nucleic Acid
  misc_feature (31)..(31): n stands for inosine
aacacaaucugaugaggccguuaggccgaanccacuug

SEQ ID NO: 910 - RNA, 38 nt, Artificial Sequence
  Description of Artificial Sequence:  Nucleic Acid
  misc_feature (31)..(31): n stands for inosine
gaacacaacugaugaggccguuaggccgaangccacuu

SEQ ID NO: 911 - RNA, 38 nt, Artificial Sequence
  Description of Artificial Sequence:  Nucleic Acid
  misc_feature (31)..(31): n stands for inosine
aggggucccugaugaggccguuaggccgaanaacacaa

SEQ ID NO: 912 - RNA, 38 nt, Artificial Sequence
  Description of Artificial Sequence:  Nucleic Acid
  misc_feature (31)..(31): n stands for inosine
uagggaggcugaugaggccguuaggccgaanuccggaa

SEQ ID NO: 913 - RNA, 38 nt, Artificial Sequence
  Description of Artificial Sequence:  Nucleic Acid
  misc_feature (31)..(31): n stands for inosine
guagggagcugaugaggccguuaggccgaanguccgga

SEQ ID NO: 914 - RNA, 38 nt, Artificial Sequence
  Description of Artificial Sequence:  Nucleic Acid
  misc_feature (31)..(31): n stands for inosine
cguagggacugaugaggccguuaggccgaangguccgg

SEQ ID NO: 915 - RNA, 38 nt, Artificial Sequence
  Description of Artificial Sequence:  Nucleic Acid
  misc_feature (31)..(31): n stands for inosine
gcguagggcugaugaggccguuaggccgaanggguccg

SEQ ID NO: 916 - RNA, 38 nt, Artificial Sequence
  Description of Artificial Sequence:  Nucleic Acid
  misc_feature (31)..(31): n stands for inosine
cugcguagcugaugaggccguuaggccgaanagggguc

SEQ ID NO: 917 - RNA, 38 nt, Artificial Sequence
  Description of Artificial Sequence:  Nucleic Acid
  misc_feature (31)..(31): n stands for inosine
ucugcguacugaugaggccguuaggccgaangaggggu

SEQ ID NO: 918 - RNA, 38 nt, Artificial Sequence
  Description of Artificial Sequence:  Nucleic Acid
  misc_feature (31)..(31): n stands for inosine
gucugcgucugaugaggccguuaggccgaanggagggg

SEQ ID NO: 919 - RNA, 38 nt, Artificial Sequence
  Description of Artificial Sequence:  Nucleic Acid
  misc_feature (31)..(31): n stands for inosine
cugggguccugaugaggccguuaggccgaancguaggg

SEQ ID NO: 920 - RNA, 38 nt, Artificial Sequence
  Description of Artificial Sequence:  Nucleic Acid
  misc_feature (31)..(31): n stands for inosine
caggcuggcugaugaggccguuaggccgaanucugcgu

SEQ ID NO: 921 - RNA, 38 nt, Artificial Sequence
  Description of Artificial Sequence:  Nucleic Acid
  misc_feature (31)..(31): n stands for inosine
gcaggcugcugaugaggccguuaggccgaangucugcg

SEQ ID NO: 922 - RNA, 38 nt, Artificial Sequence
  Description of Artificial Sequence:  Nucleic Acid
  misc_feature (31)..(31): n stands for inosine
ugcaggcucugaugaggccguuaggccgaanggucugc

SEQ ID NO: 923 - RNA, 38 nt, Artificial Sequence
  Description of Artificial Sequence:  Nucleic Acid
  misc_feature (31)..(31): n stands for inosine
cugcaggccugaugaggccguuaggccgaangggucug

SEQ ID NO: 924 - RNA, 38 nt, Artificial Sequence
  Description of Artificial Sequence:  Nucleic Acid
  misc_feature (31)..(31): n stands for inosine
agccugcacugaugaggccguuaggccgaancuggggu

SEQ ID NO: 925 - RNA, 38 nt, Artificial Sequence
  Description of Artificial Sequence:  Nucleic Acid
  misc_feature (31)..(31): n stands for inosine
gagccugccugaugaggccguuaggccgaangcugggg

SEQ ID NO: 926 - RNA, 38 nt, Artificial Sequence
  Description of Artificial Sequence:  Nucleic Acid
  misc_feature (31)..(31): n stands for inosine
caggagcccugaugaggccguuaggccgaancaggcug

SEQ ID NO: 927 - RNA, 38 nt, Artificial Sequence
  Description of Artificial Sequence:  Nucleic Acid
  misc_feature (31)..(31): n stands for inosine
cgcacaggcugaugaggccguuaggccgaanccugcag

SEQ ID NO: 928 - RNA, 38 nt, Artificial Sequence
  Description of Artificial Sequence:  Nucleic Acid
  misc_feature (31)..(31): n stands for inosine
cacgcacacugaugaggccguuaggccgaanagccugc

SEQ ID NO: 929 - RNA, 38 nt, Artificial Sequence
  Description of Artificial Sequence:  Nucleic Acid
  misc_feature (31)..(31): n stands for inosine
acacgcaccugaugaggccguuaggccgaangagccug

SEQ ID NO: 930 - RNA, 38 nt, Artificial Sequence
  Description of Artificial Sequence:  Nucleic Acid
  misc_feature (31)..(31): n stands for inosine
cugcauggcugaugaggccguuaggccgaanacacgca

SEQ ID NO: 931 - RNA, 38 nt, Artificial Sequence
  Description of Artificial Sequence:  Nucleic Acid
  misc_feature (31)..(31): n stands for inosine
agcugcaucugaugaggccguuaggccgaanagacacg

SEQ ID NO: 932 - RNA, 38 nt, Artificial Sequence
  Description of Artificial Sequence:  Nucleic Acid
  misc_feature (31)..(31): n stands for inosine
cagcugcacugaugaggccguuaggccgaangagacac

SEQ ID NO: 933 - RNA, 38 nt, Artificial Sequence
  Description of Artificial Sequence:  Nucleic Acid
  misc_feature (31)..(31): n stands for inosine
gccgcagccugaugaggccguuaggccgaancauggag

SEQ ID NO: 934 - RNA, 38 nt, Artificial Sequence
  Description of Artificial Sequence:  Nucleic Acid
  misc_feature (31)..(31): n stands for inosine
gccgccgccugaugaggccguuaggccgaancugcaug

SEQ ID NO: 935 - RNA, 38 nt, Artificial Sequence
  Description of Artificial Sequence:  Nucleic Acid
  misc_feature (31)..(31): n stands for inosine
ggucggaacugaugaggccguuaggccgaanccgccgc

SEQ ID NO: 936 - RNA, 38 nt, Artificial Sequence
  Description of Artificial Sequence:  Nucleic Acid
  misc_feature (31)..(31): n stands for inosine
cggucggacugaugaggccguuaggccgaangccgccg

SEQ ID NO: 937 - RNA, 38 nt, Artificial Sequence
  Description of Artificial Sequence:  Nucleic Acid
  misc_feature (31)..(31): n stands for inosine
ucccgguccugaugaggccguuaggccgaanaaggccg

SEQ ID NO: 938 - RNA, 38 nt, Artificial Sequence
  Description of Artificial Sequence:  Nucleic Acid
  misc_feature (31)..(31): n stands for inosine
gagcuccccugaugaggccguuaggccgaanucggaag

SEQ ID NO: 939 - RNA, 38 nt, Artificial Sequence
  Description of Artificial Sequence:  Nucleic Acid
  misc_feature (31)..(31): n stands for inosine
gcucacugcugaugaggccguuaggccgaancucccgg

SEQ ID NO: 940 - RNA, 38 nt, Artificial Sequence
  Description of Artificial Sequence:  Nucleic Acid
  misc_feature (31)..(31): n stands for inosine
gggcucaccugaugaggccguuaggccgaanagcuccc

SEQ ID NO: 941 - RNA, 38 nt, Artificial Sequence
  Description of Artificial Sequence:  Nucleic Acid
  misc_feature (31)..(31): n stands for inosine
auuccaugcugaugaggccguuaggccgaancucacug

SEQ ID NO: 942 - RNA, 38 nt, Artificial Sequence
  Description of Artificial Sequence:  Nucleic Acid
  misc_feature (31)..(31): n stands for inosine
aauuccaucugaugaggccguuaggccgaangcucacu

SEQ ID NO: 943 - RNA, 38 nt, Artificial Sequence
  Description of Artificial Sequence:  Nucleic Acid
  misc_feature (31)..(31): n stands for inosine
gaauuccacugaugaggccguuaggccgaanggcucac

SEQ ID NO: 944 - RNA, 38 nt, Artificial Sequence
  Description of Artificial Sequence:  Nucleic Acid
  misc_feature (31)..(31): n stands for inosine
cagguacucugaugaggccguuaggccgaanaauucca

SEQ ID NO: 945 - RNA, 38 nt, Artificial Sequence
  Description of Artificial Sequence:  Nucleic Acid
  misc_feature (31)..(31): n stands for inosine
gcagguaccugaugaggccguuaggccgaangaauucc

SEQ ID NO: 946 - RNA, 38 nt, Artificial Sequence
  Description of Artificial Sequence:  Nucleic Acid
  misc_feature (31)..(31): n stands for inosine
aucuggcacugaugaggccguuaggccgaanuacugga

SEQ ID NO: 947 - RNA, 38 nt, Artificial Sequence
  Description of Artificial Sequence:  Nucleic Acid
  misc_feature (31)..(31): n stands for inosine
uaucuggccugaugaggccguuaggccgaanguacugg

SEQ ID NO: 948 - RNA, 38 nt, Artificial Sequence
  Description of Artificial Sequence:  Nucleic Acid
  misc_feature (31)..(31): n stands for inosine
cuguaucucugaugaggccguuaggccgaancagguac

SEQ ID NO: 949 - RNA, 38 nt, Artificial Sequence
  Description of Artificial Sequence:  Nucleic Acid
  misc_feature (31)..(31): n stands for inosine
ucuguauccugaugaggccguuaggccgaangcaggua

SEQ ID NO: 950 - RNA, 38 nt, Artificial Sequence
  Description of Artificial Sequence:  Nucleic Acid
  misc_feature (31)..(31): n stands for inosine
cgaucguccugaugaggccguuaggccgaanuaucugg

SEQ ID NO: 951 - RNA, 38 nt, Artificial Sequence
  Description of Artificial Sequence:  Nucleic Acid
  misc_feature (31)..(31): n stands for inosine
caauccggcugaugaggccguuaggccgaanacgaucg

SEQ ID NO: 952 - RNA, 38 nt, Artificial Sequence
  Description of Artificial Sequence:  Nucleic Acid
  misc_feature (31)..(31): n stands for inosine
cucaaucccugaugaggccguuaggccgaanugacgau

SEQ ID NO: 953 - RNA, 38 nt, Artificial Sequence
  Description of Artificial Sequence:  Nucleic Acid
  misc_feature (31)..(31): n stands for inosine
gucucauacugaugaggccguuaggccgaanuccuuuu

SEQ ID NO: 954 - RNA, 38 nt, Artificial Sequence
  Description of Artificial Sequence:  Nucleic Acid
  misc_feature (31)..(31): n stands for inosine
cucuugaacugaugaggccguuaggccgaanucucaua

SEQ ID NO: 955 - RNA, 38 nt, Artificial Sequence
  Description of Artificial Sequence:  Nucleic Acid
  misc_feature (31)..(31): n stands for inosine
gcucuugacugaugaggccguuaggccgaangucucau

SEQ ID NO: 956 - RNA, 38 nt, Artificial Sequence
  Description of Artificial Sequence:  Nucleic Acid
  misc_feature (31)..(31): n stands for inosine
gaugcucucugaugaggccguuaggccgaanaaggucu

SEQ ID NO: 957 - RNA, 38 nt, Artificial Sequence
  Description of Artificial Sequence:  Nucleic Acid
  misc_feature (31)..(31): n stands for inosine
cuucaugacugaugaggccguuaggccgaancucuuga

SEQ ID NO: 958 - RNA, 38 nt, Artificial Sequence
  Description of Artificial Sequence:  Nucleic Acid
  misc_feature (31)..(31): n stands for inosine
cuucuucacugaugaggccguuaggccgaanaugcucu

SEQ ID NO: 959 - RNA, 38 nt, Artificial Sequence
  Description of Artificial Sequence:  Nucleic Acid
  misc_feature (31)..(31): n stands for inosine
cgcugaaacugaugaggccguuaggccgaanacucuuc

SEQ ID NO: 960 - RNA, 38 nt, Artificial Sequence
  Description of Artificial Sequence:  Nucleic Acid
  misc_feature (31)..(31): n stands for inosine
ccgcugaacugaugaggccguuaggccgaangacucuu

SEQ ID NO: 961 - RNA, 38 nt, Artificial Sequence
  Description of Artificial Sequence:  Nucleic Acid
  misc_feature (31)..(31): n stands for inosine
ggguccgccugaugaggccguuaggccgaanaaaggac

SEQ ID NO: 962 - RNA, 38 nt, Artificial Sequence
  Description of Artificial Sequence:  Nucleic Acid
  misc_feature (31)..(31): n stands for inosine
ggucggugcugaugaggccguuaggccgaanuccgcug

SEQ ID NO: 963 - RNA, 38 nt, Artificial Sequence
  Description of Artificial Sequence:  Nucleic Acid
  misc_feature (31)..(31): n stands for inosine
gggucggucugaugaggccguuaggccgaanguccgcu

SEQ ID NO: 964 - RNA, 38 nt, Artificial Sequence
  Description of Artificial Sequence:  Nucleic Acid
  misc_feature (31)..(31): n stands for inosine
ggggucggcugaugaggccguuaggccgaangguccgc

SEQ ID NO: 965 - RNA, 38 nt, Artificial Sequence
  Description of Artificial Sequence:  Nucleic Acid
  misc_feature (31)..(31): n stands for inosine
cggggguccugaugaggccguuaggccgaanugggucc

SEQ ID NO: 966 - RNA, 38 nt, Artificial Sequence
  Description of Artificial Sequence:  Nucleic Acid
  misc_feature (31)..(31): n stands for inosine
aggccgggcugaugaggccguuaggccgaanucggugg

SEQ ID NO: 967 - RNA, 38 nt, Artificial Sequence
  Description of Artificial Sequence:  Nucleic Acid
  misc_feature (31)..(31): n stands for inosine
gaggccggcugaugaggccguuaggccgaangucggug

SEQ ID NO: 968 - RNA, 38 nt, Artificial Sequence
  Description of Artificial Sequence:  Nucleic Acid
  misc_feature (31)..(31): n stands for inosine
ggaggccgcugaugaggccguuaggccgaanggucggu

SEQ ID NO: 969 - RNA, 38 nt, Artificial Sequence
  Description of Artificial Sequence:  Nucleic Acid
  misc_feature (31)..(31): n stands for inosine
uggaggcccugaugaggccguuaggccgaangggucgg

SEQ ID NO: 970 - RNA, 38 nt, Artificial Sequence
  Description of Artificial Sequence:  Nucleic Acid
  misc_feature (31)..(31): n stands for inosine
gagguggacugaugaggccguuaggccgaanccggggg

SEQ ID NO: 971 - RNA, 38 nt, Artificial Sequence
  Description of Artificial Sequence:  Nucleic Acid
  misc_feature (31)..(31): n stands for inosine
cgagguggcugaugaggccguuaggccgaangccgggg

SEQ ID NO: 972 - RNA, 38 nt, Artificial Sequence
  Description of Artificial Sequence:  Nucleic Acid
  misc_feature (31)..(31): n stands for inosine
gucgaggucugaugaggccguuaggccgaanaggccgg

SEQ ID NO: 973 - RNA, 38 nt, Artificial Sequence
  Description of Artificial Sequence:  Nucleic Acid
  misc_feature (31)..(31): n stands for inosine
cgucgaggcugaugaggccguuaggccgaangaggccg

SEQ ID NO: 974 - RNA, 38 nt, Artificial Sequence
  Description of Artificial Sequence:  Nucleic Acid
  misc_feature (31)..(31): n stands for inosine
ugcgucgacugaugaggccguuaggccgaanuggaggc

SEQ ID NO: 975 - RNA, 38 nt, Artificial Sequence
  Description of Artificial Sequence:  Nucleic Acid
  misc_feature (31)..(31): n stands for inosine
augcgucgcugaugaggccguuaggccgaanguggagg

SEQ ID NO: 976 - RNA, 38 nt, Artificial Sequence
  Description of Artificial Sequence:  Nucleic Acid
  misc_feature (31)..(31): n stands for inosine
cacagcaacugaugaggccguuaggccgaancgucgag

SEQ ID NO: 977 - RNA, 38 nt, Artificial Sequence
  Description of Artificial Sequence:  Nucleic Acid
  misc_feature (31)..(31): n stands for inosine
gaaggcaccugaugaggccguuaggccgaancaaugcg

SEQ ID NO: 978 - RNA, 38 nt, Artificial Sequence
  Description of Artificial Sequence:  Nucleic Acid
  misc_feature (31)..(31): n stands for inosine
ugcgggaacugaugaggccguuaggccgaancacagca

SEQ ID NO: 979 - RNA, 38 nt, Artificial Sequence
  Description of Artificial Sequence:  Nucleic Acid
  misc_feature (31)..(31): n stands for inosine
cugcgggacugaugaggccguuaggccgaangcacagc

SEQ ID NO: 980 - RNA, 38 nt, Artificial Sequence
  Description of Artificial Sequence:  Nucleic Acid
  misc_feature (31)..(31): n stands for inosine
gagcugcgcugaugaggccguuaggccgaanaaggcac

SEQ ID NO: 981 - RNA, 38 nt, Artificial Sequence
  Description of Artificial Sequence:  Nucleic Acid
  misc_feature (31)..(31): n stands for inosine
ugagcugccugaugaggccguuaggccgaangaaggca

SEQ ID NO: 982 - RNA, 38 nt, Artificial Sequence
  Description of Artificial Sequence:  Nucleic Acid
  misc_feature (31)..(31): n stands for inosine
agcugagccugaugaggccguuaggccgaancgggaag

SEQ ID NO: 983 - RNA, 38 nt, Artificial Sequence
  Description of Artificial Sequence:  Nucleic Acid
  misc_feature (31)..(31): n stands for inosine
agaagcugcugaugaggccguuaggccgaancugcggg

SEQ ID NO: 984 - RNA, 38 nt, Artificial Sequence
  Description of Artificial Sequence:  Nucleic Acid
  misc_feature (31)..(31): n stands for inosine
acagaagccugaugaggccguuaggccgaanagcugcg

SEQ ID NO: 985 - RNA, 38 nt, Artificial Sequence
  Description of Artificial Sequence:  Nucleic Acid
  misc_feature (31)..(31): n stands for inosine
gggacagacugaugaggccguuaggccgaancugagcu

SEQ ID NO: 986 - RNA, 38 nt, Artificial Sequence
  Description of Artificial Sequence:  Nucleic Acid
  misc_feature (31)..(31): n stands for inosine
uuggggaccugaugaggccguuaggccgaanaagcuga

SEQ ID NO: 987 - RNA, 38 nt, Artificial Sequence
  Description of Artificial Sequence:  Nucleic Acid
  misc_feature (31)..(31): n stands for inosine
uggcuuggcugaugaggccguuaggccgaanacagaag

SEQ ID NO: 988 - RNA, 38 nt, Artificial Sequence
  Description of Artificial Sequence:  Nucleic Acid
  misc_feature (31)..(31): n stands for inosine
cuggcuugcugaugaggccguuaggccgaangacagaa

SEQ ID NO: 989 - RNA, 38 nt, Artificial Sequence
  Description of Artificial Sequence:  Nucleic Acid
  misc_feature (31)..(31): n stands for inosine
gcuggcuucugaugaggccguuaggccgaanggacaga

SEQ ID NO: 990 - RNA, 38 nt, Artificial Sequence
  Description of Artificial Sequence:  Nucleic Acid
  misc_feature (31)..(31): n stands for inosine
ugcuggcucugaugaggccguuaggccgaangggacag

SEQ ID NO: 991 - RNA, 38 nt, Artificial Sequence
  Description of Artificial Sequence:  Nucleic Acid
  misc_feature (31)..(31): n stands for inosine
ggggugcucugaugaggccguuaggccgaancuugggg

SEQ ID NO: 992 - RNA, 38 nt, Artificial Sequence
  Description of Artificial Sequence:  Nucleic Acid
  misc_feature (31)..(31): n stands for inosine
uggggugccugaugaggccguuaggccgaangcuuggg

SEQ ID NO: 993 - RNA, 38 nt, Artificial Sequence
  Description of Artificial Sequence:  Nucleic Acid
  misc_feature (31)..(31): n stands for inosine
ggcuggggcugaugaggccguuaggccgaancuggcuu

SEQ ID NO: 994 - RNA, 38 nt, Artificial Sequence
  Description of Artificial Sequence:  Nucleic Acid
  misc_feature (31)..(31): n stands for inosine
agggcuggcugaugaggccguuaggccgaanugcuggc

SEQ ID NO: 995 - RNA, 38 nt, Artificial Sequence
  Description of Artificial Sequence:  Nucleic Acid
  misc_feature (31)..(31): n stands for inosine
uagggcugcugaugaggccguuaggccgaangugcugg

SEQ ID NO: 996 - RNA, 38 nt, Artificial Sequence
  Description of Artificial Sequence:  Nucleic Acid
  misc_feature (31)..(31): n stands for inosine
auagggcucugaugaggccguuaggccgaanggugcug

SEQ ID NO: 997 - RNA, 38 nt, Artificial Sequence
  Description of Artificial Sequence:  Nucleic Acid
  misc_feature (31)..(31): n stands for inosine
gauagggccugaugaggccguuaggccgaangggugcu

SEQ ID NO: 998 - RNA, 38 nt, Artificial Sequence
  Description of Artificial Sequence:  Nucleic Acid
  misc_feature (31)..(31): n stands for inosine
agggauagcugaugaggccguuaggccgaancuggggu

SEQ ID NO: 999 - RNA, 38 nt, Artificial Sequence
  Description of Artificial Sequence:  Nucleic Acid
  misc_feature (31)..(31): n stands for inosine
aagggauacugaugaggccguuaggccgaangcugggg

SEQ ID NO: 1000 - RNA, 38 nt, Artificial Sequence
  Description of Artificial Sequence:  Nucleic Acid
  misc_feature (31)..(31): n stands for inosine
aaagggaucugaugaggccguuaggccgaanggcuggg

SEQ ID NO: 1001 - RNA, 38 nt, Artificial Sequence
  Description of Artificial Sequence:  Nucleic Acid
  misc_feature (31)..(31): n stands for inosine
acguaaagcugaugaggccguuaggccgaanauagggc

SEQ ID NO: 1002 - RNA, 38 nt, Artificial Sequence
  Description of Artificial Sequence:  Nucleic Acid
  misc_feature (31)..(31): n stands for inosine
gacguaaacugaugaggccguuaggccgaangauaggg

SEQ ID NO: 1003 - RNA, 38 nt, Artificial Sequence
  Description of Artificial Sequence:  Nucleic Acid
  misc_feature (31)..(31): n stands for inosine
ugacguaacugaugaggccguuaggccgaanggauagg

SEQ ID NO: 1004 - RNA, 38 nt, Artificial Sequence
  Description of Artificial Sequence:  Nucleic Acid
  misc_feature (31)..(31): n stands for inosine
cucagggacugaugaggccguuaggccgaanacguaaa

SEQ ID NO: 1005 - RNA, 38 nt, Artificial Sequence
  Description of Artificial Sequence:  Nucleic Acid
  misc_feature (31)..(31): n stands for inosine
gugcucagcugaugaggccguuaggccgaanaugacgu

SEQ ID NO: 1006 - RNA, 38 nt, Artificial Sequence
  Description of Artificial Sequence:  Nucleic Acid
  misc_feature (31)..(31): n stands for inosine
ggugcucacugaugaggccguuaggccgaangaugacg

SEQ ID NO: 1007 - RNA, 38 nt, Artificial Sequence
  Description of Artificial Sequence:  Nucleic Acid
  misc_feature (31)..(31): n stands for inosine
uggugcuccugaugaggccguuaggccgaanggaugac

SEQ ID NO: 1008 - RNA, 38 nt, Artificial Sequence
  Description of Artificial Sequence:  Nucleic Acid
  misc_feature (31)..(31): n stands for inosine
guugauggcugaugaggccguuaggccgaancucaggg

SEQ ID NO: 1009 - RNA, 38 nt, Artificial Sequence
  Description of Artificial Sequence:  Nucleic Acid
  misc_feature (31)..(31): n stands for inosine
uaguugaucugaugaggccguuaggccgaanugcucag

SEQ ID NO: 1010 - RNA, 38 nt, Artificial Sequence
  Description of Artificial Sequence:  Nucleic Acid
  misc_feature (31)..(31): n stands for inosine
auaguugacugaugaggccguuaggccgaangugcuca

SEQ ID NO: 1011 - RNA, 38 nt, Artificial Sequence
  Description of Artificial Sequence:  Nucleic Acid
  misc_feature (31)..(31): n stands for inosine
aucauagucugaugaggccguuaggccgaanauggugc

SEQ ID NO: 1012 - RNA, 38 nt, Artificial Sequence
  Description of Artificial Sequence:  Nucleic Acid
  misc_feature (31)..(31): n stands for inosine
cucaucaucugaugaggccguuaggccgaanuugaugg

SEQ ID NO: 1013 - RNA, 38 nt, Artificial Sequence
  Description of Artificial Sequence:  Nucleic Acid
  misc_feature (31)..(31): n stands for inosine
ccauggugcugaugaggccguuaggccgaanaaacuca

SEQ ID NO: 1014 - RNA, 38 nt, Artificial Sequence
  Description of Artificial Sequence:  Nucleic Acid
  misc_feature (31)..(31): n stands for inosine
accauggucugaugaggccguuaggccgaangaaacuc

SEQ ID NO: 1015 - RNA, 38 nt, Artificial Sequence
  Description of Artificial Sequence:  Nucleic Acid
  misc_feature (31)..(31): n stands for inosine
caccauggcugaugaggccguuaggccgaanggaaacu

SEQ ID NO: 1016 - RNA, 38 nt, Artificial Sequence
  Description of Artificial Sequence:  Nucleic Acid
  misc_feature (31)..(31): n stands for inosine
aacaccaucugaugaggccguuaggccgaanugggaaa

SEQ ID NO: 1017 - RNA, 38 nt, Artificial Sequence
  Description of Artificial Sequence:  Nucleic Acid
  misc_feature (31)..(31): n stands for inosine
aaacaccacugaugaggccguuaggccgaangugggaa

SEQ ID NO: 1018 - RNA, 38 nt, Artificial Sequence
  Description of Artificial Sequence:  Nucleic Acid
  misc_feature (31)..(31): n stands for inosine
gcccagaacugaugaggccguuaggccgaanaaacacc

SEQ ID NO: 1019 - RNA, 38 nt, Artificial Sequence
  Description of Artificial Sequence:  Nucleic Acid
  misc_feature (31)..(31): n stands for inosine
ugcccagacugaugaggccguuaggccgaangaaacac

SEQ ID NO: 1020 - RNA, 38 nt, Artificial Sequence
  Description of Artificial Sequence:  Nucleic Acid
  misc_feature (31)..(31): n stands for inosine
aucugccccugaugaggccguuaggccgaanaaggaaa

SEQ ID NO: 1021 - RNA, 38 nt, Artificial Sequence
  Description of Artificial Sequence:  Nucleic Acid
  misc_feature (31)..(31): n stands for inosine
ggcugauccugaugaggccguuaggccgaancccagaa

SEQ ID NO: 1022 - RNA, 38 nt, Artificial Sequence
  Description of Artificial Sequence:  Nucleic Acid
  misc_feature (31)..(31): n stands for inosine
ggccuggccugaugaggccguuaggccgaanaucugcc

SEQ ID NO: 1023 - RNA, 38 nt, Artificial Sequence
  Description of Artificial Sequence:  Nucleic Acid
  misc_feature (31)..(31): n stands for inosine
cgaggccucugaugaggccguuaggccgaancugaucu

SEQ ID NO: 1024 - RNA, 38 nt, Artificial Sequence
  Description of Artificial Sequence:  Nucleic Acid
  misc_feature (31)..(31): n stands for inosine
ccgaggcccugaugaggccguuaggccgaangcugauc

SEQ ID NO: 1025 - RNA, 38 nt, Artificial Sequence
  Description of Artificial Sequence:  Nucleic Acid
  misc_feature (31)..(31): n stands for inosine
aaggccgacugaugaggccguuaggccgaanccuggcu

SEQ ID NO: 1026 - RNA, 38 nt, Artificial Sequence
  Description of Artificial Sequence:  Nucleic Acid
  misc_feature (31)..(31): n stands for inosine
caaggccgcugaugaggccguuaggccgaangccuggc

SEQ ID NO: 1027 - RNA, 38 nt, Artificial Sequence
  Description of Artificial Sequence:  Nucleic Acid
  misc_feature (31)..(31): n stands for inosine
ggggccaacugaugaggccguuaggccgaanccgaggc

SEQ ID NO: 1028 - RNA, 38 nt, Artificial Sequence
  Description of Artificial Sequence:  Nucleic Acid
  misc_feature (31)..(31): n stands for inosine
cggggccacugaugaggccguuaggccgaangccgagg

SEQ ID NO: 1029 - RNA, 38 nt, Artificial Sequence
  Description of Artificial Sequence:  Nucleic Acid
  misc_feature (31)..(31): n stands for inosine
ggggccggcugaugaggccguuaggccgaanccaaggc

SEQ ID NO: 1030 - RNA, 38 nt, Artificial Sequence
  Description of Artificial Sequence:  Nucleic Acid
  misc_feature (31)..(31): n stands for inosine
aggggccgcugaugaggccguuaggccgaangccaagg

SEQ ID NO: 1031 - RNA, 38 nt, Artificial Sequence
  Description of Artificial Sequence:  Nucleic Acid
  misc_feature (31)..(31): n stands for inosine
gaggggcccugaugaggccguuaggccgaanggccaag

SEQ ID NO: 1032 - RNA, 38 nt, Artificial Sequence
  Description of Artificial Sequence:  Nucleic Acid
  misc_feature (31)..(31): n stands for inosine
uggggaggcugaugaggccguuaggccgaanccggggc

SEQ ID NO: 1033 - RNA, 38 nt, Artificial Sequence
  Description of Artificial Sequence:  Nucleic Acid
  misc_feature (31)..(31): n stands for inosine
uuggggagcugaugaggccguuaggccgaangccgggg

SEQ ID NO: 1034 - RNA, 38 nt, Artificial Sequence
  Description of Artificial Sequence:  Nucleic Acid
  misc_feature (31)..(31): n stands for inosine
cuuggggacugaugaggccguuaggccgaanggccggg

SEQ ID NO: 1035 - RNA, 38 nt, Artificial Sequence
  Description of Artificial Sequence:  Nucleic Acid
  misc_feature (31)..(31): n stands for inosine
acuuggggcugaugaggccguuaggccgaangggccgg

SEQ ID NO: 1036 - RNA, 38 nt, Artificial Sequence
  Description of Artificial Sequence:  Nucleic Acid
  misc_feature (31)..(31): n stands for inosine
ggacuuggcugaugaggccguuaggccgaanaggggcc

SEQ ID NO: 1037 - RNA, 38 nt, Artificial Sequence
  Description of Artificial Sequence:  Nucleic Acid
  misc_feature (31)..(31): n stands for inosine
aggacuugcugaugaggccguuaggccgaangaggggc

SEQ ID NO: 1038 - RNA, 38 nt, Artificial Sequence
  Description of Artificial Sequence:  Nucleic Acid
  misc_feature (31)..(31): n stands for inosine
caggacuucugaugaggccguuaggccgaanggagggg

SEQ ID NO: 1039 - RNA, 38 nt, Artificial Sequence
  Description of Artificial Sequence:  Nucleic Acid
  misc_feature (31)..(31): n stands for inosine
gcaggacucugaugaggccguuaggccgaangggaggg

SEQ ID NO: 1040 - RNA, 38 nt, Artificial Sequence
  Description of Artificial Sequence:  Nucleic Acid
  misc_feature (31)..(31): n stands for inosine
cuggggcacugaugaggccguuaggccgaanacuuggg

SEQ ID NO: 1041 - RNA, 38 nt, Artificial Sequence
  Description of Artificial Sequence:  Nucleic Acid
  misc_feature (31)..(31): n stands for inosine
ccuggggccugaugaggccguuaggccgaangacuugg

SEQ ID NO: 1042 - RNA, 38 nt, Artificial Sequence
  Description of Artificial Sequence:  Nucleic Acid
  misc_feature (31)..(31): n stands for inosine
gagccuggcugaugaggccguuaggccgaancaggacu

SEQ ID NO: 1043 - RNA, 38 nt, Artificial Sequence
  Description of Artificial Sequence:  Nucleic Acid
  misc_feature (31)..(31): n stands for inosine
ggagccugcugaugaggccguuaggccgaangcaggac

SEQ ID NO: 1044 - RNA, 38 nt, Artificial Sequence
  Description of Artificial Sequence:  Nucleic Acid
  misc_feature (31)..(31): n stands for inosine
uggagccucugaugaggccguuaggccgaanggcagga

SEQ ID NO: 1045 - RNA, 38 nt, Artificial Sequence
  Description of Artificial Sequence:  Nucleic Acid
  misc_feature (31)..(31): n stands for inosine
cuggagcccugaugaggccguuaggccgaangggcagg

SEQ ID NO: 1046 - RNA, 38 nt, Artificial Sequence
  Description of Artificial Sequence:  Nucleic Acid
  misc_feature (31)..(31): n stands for inosine
ggggcuggcugaugaggccguuaggccgaanccugggg

SEQ ID NO: 1047 - RNA, 38 nt, Artificial Sequence
  Description of Artificial Sequence:  Nucleic Acid
  misc_feature (31)..(31): n stands for inosine
caggggcucugaugaggccguuaggccgaanagccugg

SEQ ID NO: 1048 - RNA, 38 nt, Artificial Sequence
  Description of Artificial Sequence:  Nucleic Acid
  misc_feature (31)..(31): n stands for inosine
gcaggggccugaugaggccguuaggccgaangagccug

SEQ ID NO: 1049 - RNA, 38 nt, Artificial Sequence
  Description of Artificial Sequence:  Nucleic Acid
  misc_feature (31)..(31): n stands for inosine
ggggcaggcugaugaggccguuaggccgaancuggagc

SEQ ID NO: 1050 - RNA, 38 nt, Artificial Sequence
  Description of Artificial Sequence:  Nucleic Acid
  misc_feature (31)..(31): n stands for inosine
aggggcagcugaugaggccguuaggccgaangcuggag

SEQ ID NO: 1051 - RNA, 38 nt, Artificial Sequence
  Description of Artificial Sequence:  Nucleic Acid
  misc_feature (31)..(31): n stands for inosine
caggggcacugaugaggccguuaggccgaanggcugga

SEQ ID NO: 1052 - RNA, 38 nt, Artificial Sequence
  Description of Artificial Sequence:  Nucleic Acid
  misc_feature (31)..(31): n stands for inosine
gcaggggccugaugaggccguuaggccgaangggcugg

SEQ ID NO: 1053 - RNA, 38 nt, Artificial Sequence
  Description of Artificial Sequence:  Nucleic Acid
  misc_feature (31)..(31): n stands for inosine
ggagcaggcugaugaggccguuaggccgaancaggggc

SEQ ID NO: 1054 - RNA, 38 nt, Artificial Sequence
  Description of Artificial Sequence:  Nucleic Acid
  misc_feature (31)..(31): n stands for inosine
uggagcagcugaugaggccguuaggccgaangcagggg

SEQ ID NO: 1055 - RNA, 38 nt, Artificial Sequence
  Description of Artificial Sequence:  Nucleic Acid
  misc_feature (31)..(31): n stands for inosine
cuggagcacugaugaggccguuaggccgaanggcaggg

SEQ ID NO: 1056 - RNA, 38 nt, Artificial Sequence
  Description of Artificial Sequence:  Nucleic Acid
  misc_feature (31)..(31): n stands for inosine
gcuggagccugaugaggccguuaggccgaangggcagg

SEQ ID NO: 1057 - RNA, 38 nt, Artificial Sequence
  Description of Artificial Sequence:  Nucleic Acid
  misc_feature (31)..(31): n stands for inosine
auggcuggcugaugaggccguuaggccgaancaggggc

SEQ ID NO: 1058 - RNA, 38 nt, Artificial Sequence
  Description of Artificial Sequence:  Nucleic Acid
  misc_feature (31)..(31): n stands for inosine
ccauggcucugaugaggccguuaggccgaanagcaggg

SEQ ID NO: 1059 - RNA, 38 nt, Artificial Sequence
  Description of Artificial Sequence:  Nucleic Acid
  misc_feature (31)..(31): n stands for inosine
accauggccugaugaggccguuaggccgaangagcagg

SEQ ID NO: 1060 - RNA, 38 nt, Artificial Sequence
  Description of Artificial Sequence:  Nucleic Acid
  misc_feature (31)..(31): n stands for inosine
gauaccaucugaugaggccguuaggccgaancuggagc

SEQ ID NO: 1061 - RNA, 38 nt, Artificial Sequence
  Description of Artificial Sequence:  Nucleic Acid
  misc_feature (31)..(31): n stands for inosine
ugauaccacugaugaggccguuaggccgaangcuggag

SEQ ID NO: 1062 - RNA, 38 nt, Artificial Sequence
  Description of Artificial Sequence:  Nucleic Acid
  misc_feature (31)..(31): n stands for inosine
gccagagccugaugaggccguuaggccgaanauaccau

SEQ ID NO: 1063 - RNA, 38 nt, Artificial Sequence
  Description of Artificial Sequence:  Nucleic Acid
  misc_feature (31)..(31): n stands for inosine
ugggccagcugaugaggccguuaggccgaancugauac

SEQ ID NO: 1064 - RNA, 38 nt, Artificial Sequence
  Description of Artificial Sequence:  Nucleic Acid
  misc_feature (31)..(31): n stands for inosine
ccugggcccugaugaggccguuaggccgaanagcugau

SEQ ID NO: 1065 - RNA, 38 nt, Artificial Sequence
  Description of Artificial Sequence:  Nucleic Acid
  misc_feature (31)..(31): n stands for inosine
ggggccugcugaugaggccguuaggccgaanccagagc

SEQ ID NO: 1066 - RNA, 38 nt, Artificial Sequence
  Description of Artificial Sequence:  Nucleic Acid
  misc_feature (31)..(31): n stands for inosine
uggggccucugaugaggccguuaggccgaangccagag

SEQ ID NO: 1067 - RNA, 38 nt, Artificial Sequence
  Description of Artificial Sequence:  Nucleic Acid
  misc_feature (31)..(31): n stands for inosine
cuggggcccugaugaggccguuaggccgaanggccaga

SEQ ID NO: 1068 - RNA, 38 nt, Artificial Sequence
  Description of Artificial Sequence:  Nucleic Acid
  misc_feature (31)..(31): n stands for inosine
ggggcuggcugaugaggccguuaggccgaanccugggc

SEQ ID NO: 1069 - RNA, 38 nt, Artificial Sequence
  Description of Artificial Sequence:  Nucleic Acid
  misc_feature (31)..(31): n stands for inosine
aggggcugcugaugaggccguuaggccgaangccuggg

SEQ ID NO: 1070 - RNA, 38 nt, Artificial Sequence
  Description of Artificial Sequence:  Nucleic Acid
  misc_feature (31)..(31): n stands for inosine
caggggcucugaugaggccguuaggccgaanggccugg

SEQ ID NO: 1071 - RNA, 38 nt, Artificial Sequence
  Description of Artificial Sequence:  Nucleic Acid
  misc_feature (31)..(31): n stands for inosine
acaggggccugaugaggccguuaggccgaangggccug

SEQ ID NO: 1072 - RNA, 38 nt, Artificial Sequence
  Description of Artificial Sequence:  Nucleic Acid
  misc_feature (31)..(31): n stands for inosine
gggacaggcugaugaggccguuaggccgaancuggggc

SEQ ID NO: 1073 - RNA, 38 nt, Artificial Sequence
  Description of Artificial Sequence:  Nucleic Acid
  misc_feature (31)..(31): n stands for inosine
ugggacagcugaugaggccguuaggccgaangcugggg

SEQ ID NO: 1074 - RNA, 38 nt, Artificial Sequence
  Description of Artificial Sequence:  Nucleic Acid
  misc_feature (31)..(31): n stands for inosine
cugggacacugaugaggccguuaggccgaanggcuggg

SEQ ID NO: 1075 - RNA, 38 nt, Artificial Sequence
  Description of Artificial Sequence:  Nucleic Acid
  misc_feature (31)..(31): n stands for inosine
acugggaccugaugaggccguuaggccgaangggcugg

SEQ ID NO: 1076 - RNA, 38 nt, Artificial Sequence
  Description of Artificial Sequence:  Nucleic Acid
  misc_feature (31)..(31): n stands for inosine
uaggacugcugaugaggccguuaggccgaanacagggg

SEQ ID NO: 1077 - RNA, 38 nt, Artificial Sequence
  Description of Artificial Sequence:  Nucleic Acid
  misc_feature (31)..(31): n stands for inosine
cuaggacucugaugaggccguuaggccgaangacaggg

SEQ ID NO: 1078 - RNA, 38 nt, Artificial Sequence
  Description of Artificial Sequence:  Nucleic Acid
  misc_feature (31)..(31): n stands for inosine
gcuaggaccugaugaggccguuaggccgaanggacagg

SEQ ID NO: 1079 - RNA, 38 nt, Artificial Sequence
  Description of Artificial Sequence:  Nucleic Acid
  misc_feature (31)..(31): n stands for inosine
uggggcuacugaugaggccguuaggccgaanacuggga

SEQ ID NO: 1080 - RNA, 38 nt, Artificial Sequence
  Description of Artificial Sequence:  Nucleic Acid
  misc_feature (31)..(31): n stands for inosine
cuggggcucugaugaggccguuaggccgaangacuggg

SEQ ID NO: 1081 - RNA, 38 nt, Artificial Sequence
  Description of Artificial Sequence:  Nucleic Acid
  misc_feature (31)..(31): n stands for inosine
gggccuggcugaugaggccguuaggccgaancuaggac

SEQ ID NO: 1082 - RNA, 38 nt, Artificial Sequence
  Description of Artificial Sequence:  Nucleic Acid
  misc_feature (31)..(31): n stands for inosine
agggccugcugaugaggccguuaggccgaangcuagga

SEQ ID NO: 1083 - RNA, 38 nt, Artificial Sequence
  Description of Artificial Sequence:  Nucleic Acid
  misc_feature (31)..(31): n stands for inosine
gagggccucugaugaggccguuaggccgaanggcuagg

SEQ ID NO: 1084 - RNA, 38 nt, Artificial Sequence
  Description of Artificial Sequence:  Nucleic Acid
  misc_feature (31)..(31): n stands for inosine
ggagggcccugaugaggccguuaggccgaangggcuag

SEQ ID NO: 1085 - RNA, 38 nt, Artificial Sequence
  Description of Artificial Sequence:  Nucleic Acid
  misc_feature (31)..(31): n stands for inosine
cugaggagcugaugaggccguuaggccgaanccugggg

SEQ ID NO: 1086 - RNA, 38 nt, Artificial Sequence
  Description of Artificial Sequence:  Nucleic Acid
  misc_feature (31)..(31): n stands for inosine
ccugaggacugaugaggccguuaggccgaangccuggg

SEQ ID NO: 1087 - RNA, 38 nt, Artificial Sequence
  Description of Artificial Sequence:  Nucleic Acid
  misc_feature (31)..(31): n stands for inosine
gccugaggcugaugaggccguuaggccgaanggccugg

SEQ ID NO: 1088 - RNA, 38 nt, Artificial Sequence
  Description of Artificial Sequence:  Nucleic Acid
  misc_feature (31)..(31): n stands for inosine
cagccugacugaugaggccguuaggccgaanagggccu

SEQ ID NO: 1089 - RNA, 38 nt, Artificial Sequence
  Description of Artificial Sequence:  Nucleic Acid
  misc_feature (31)..(31): n stands for inosine
acagccugcugaugaggccguuaggccgaangagggcc

SEQ ID NO: 1090 - RNA, 38 nt, Artificial Sequence
  Description of Artificial Sequence:  Nucleic Acid
  misc_feature (31)..(31): n stands for inosine
ccacagcccugaugaggccguuaggccgaanaggaggg

SEQ ID NO: 1091 - RNA, 38 nt, Artificial Sequence
  Description of Artificial Sequence:  Nucleic Acid
  misc_feature (31)..(31): n stands for inosine
ggggccaccugaugaggccguuaggccgaanccugagg

SEQ ID NO: 1092 - RNA, 38 nt, Artificial Sequence
  Description of Artificial Sequence:  Nucleic Acid
  misc_feature (31)..(31): n stands for inosine
gcagguggcugaugaggccguuaggccgaanccacagc

SEQ ID NO: 1093 - RNA, 38 nt, Artificial Sequence
  Description of Artificial Sequence:  Nucleic Acid
  misc_feature (31)..(31): n stands for inosine
ggcaggugcugaugaggccguuaggccgaangccacag

SEQ ID NO: 1094 - RNA, 38 nt, Artificial Sequence
  Description of Artificial Sequence:  Nucleic Acid
  misc_feature (31)..(31): n stands for inosine
gggcaggucugaugaggccguuaggccgaanggccaca

SEQ ID NO: 1095 - RNA, 38 nt, Artificial Sequence
  Description of Artificial Sequence:  Nucleic Acid
  misc_feature (31)..(31): n stands for inosine
ggggcaggcugaugaggccguuaggccgaangggccac

SEQ ID NO: 1096 - RNA, 38 nt, Artificial Sequence
  Description of Artificial Sequence:  Nucleic Acid
  misc_feature (31)..(31): n stands for inosine
ugggggcacugaugaggccguuaggccgaanuggggcc

SEQ ID NO: 1097 - RNA, 38 nt, Artificial Sequence
  Description of Artificial Sequence:  Nucleic Acid
  misc_feature (31)..(31): n stands for inosine
uugggggccugaugaggccguuaggccgaanguggggc

SEQ ID NO: 1098 - RNA, 38 nt, Artificial Sequence
  Description of Artificial Sequence:  Nucleic Acid
  misc_feature (31)..(31): n stands for inosine
ggcuugggcugaugaggccguuaggccgaancaggugg

SEQ ID NO: 1099 - RNA, 38 nt, Artificial Sequence
  Description of Artificial Sequence:  Nucleic Acid
  misc_feature (31)..(31): n stands for inosine
gggcuuggcugaugaggccguuaggccgaangcaggug

SEQ ID NO: 1100 - RNA, 38 nt, Artificial Sequence
  Description of Artificial Sequence:  Nucleic Acid
  misc_feature (31)..(31): n stands for inosine
ugggcuugcugaugaggccguuaggccgaanggcaggu

SEQ ID NO: 1101 - RNA, 38 nt, Artificial Sequence
  Description of Artificial Sequence:  Nucleic Acid
  misc_feature (31)..(31): n stands for inosine
gugggcuucugaugaggccguuaggccgaangggcagg

SEQ ID NO: 1102 - RNA, 38 nt, Artificial Sequence
  Description of Artificial Sequence:  Nucleic Acid
  misc_feature (31)..(31): n stands for inosine
ggugggcucugaugaggccguuaggccgaanggggcag

SEQ ID NO: 1103 - RNA, 38 nt, Artificial Sequence
  Description of Artificial Sequence:  Nucleic Acid
  misc_feature (31)..(31): n stands for inosine
ccugggugcugaugaggccguuaggccgaancuugggg

SEQ ID NO: 1104 - RNA, 38 nt, Artificial Sequence
  Description of Artificial Sequence:  Nucleic Acid
  misc_feature (31)..(31): n stands for inosine
gccugggucugaugaggccguuaggccgaangcuuggg

SEQ ID NO: 1105 - RNA, 38 nt, Artificial Sequence
  Description of Artificial Sequence:  Nucleic Acid
  misc_feature (31)..(31): n stands for inosine
agccugggcugaugaggccguuaggccgaanggcuugg

SEQ ID NO: 1106 - RNA, 38 nt, Artificial Sequence
  Description of Artificial Sequence:  Nucleic Acid
  misc_feature (31)..(31): n stands for inosine
ccagccugcugaugaggccguuaggccgaanugggcuu

SEQ ID NO: 1107 - RNA, 38 nt, Artificial Sequence
  Description of Artificial Sequence:  Nucleic Acid
  misc_feature (31)..(31): n stands for inosine
cccagccucugaugaggccguuaggccgaangugggcu

SEQ ID NO: 1108 - RNA, 38 nt, Artificial Sequence
  Description of Artificial Sequence:  Nucleic Acid
  misc_feature (31)..(31): n stands for inosine
ccccagcccugaugaggccguuaggccgaanggugggc

SEQ ID NO: 1109 - RNA, 38 nt, Artificial Sequence
  Description of Artificial Sequence:  Nucleic Acid
  misc_feature (31)..(31): n stands for inosine
ccuucccccugaugaggccguuaggccgaanccugggu

SEQ ID NO: 1110 - RNA, 38 nt, Artificial Sequence
  Description of Artificial Sequence:  Nucleic Acid
  misc_feature (31)..(31): n stands for inosine
ccucugaccugaugaggccguuaggccgaancguuccu

SEQ ID NO: 1111 - RNA, 38 nt, Artificial Sequence
  Description of Artificial Sequence:  Nucleic Acid
  misc_feature (31)..(31): n stands for inosine
agggccuccugaugaggccguuaggccgaanacagcgu

SEQ ID NO: 1112 - RNA, 38 nt, Artificial Sequence
  Description of Artificial Sequence:  Nucleic Acid
  misc_feature (31)..(31): n stands for inosine
ugcagcagcugaugaggccguuaggccgaanccucuga

SEQ ID NO: 1113 - RNA, 38 nt, Artificial Sequence
  Description of Artificial Sequence:  Nucleic Acid
  misc_feature (31)..(31): n stands for inosine
cugcagcacugaugaggccguuaggccgaangccucug

SEQ ID NO: 1114 - RNA, 38 nt, Artificial Sequence
  Description of Artificial Sequence:  Nucleic Acid
  misc_feature (31)..(31): n stands for inosine
gcugcagccugaugaggccguuaggccgaanggccucu

SEQ ID NO: 1115 - RNA, 38 nt, Artificial Sequence
  Description of Artificial Sequence:  Nucleic Acid
  misc_feature (31)..(31): n stands for inosine
gcagcugccugaugaggccguuaggccgaancagggcc

SEQ ID NO: 1116 - RNA, 38 nt, Artificial Sequence
  Description of Artificial Sequence:  Nucleic Acid
  misc_feature (31)..(31): n stands for inosine
acugcagccugaugaggccguuaggccgaancagcagg

SEQ ID NO: 1117 - RNA, 38 nt, Artificial Sequence
  Description of Artificial Sequence:  Nucleic Acid
  misc_feature (31)..(31): n stands for inosine
caaacugccugaugaggccguuaggccgaancugcagc

SEQ ID NO: 1118 - RNA, 38 nt, Artificial Sequence
  Description of Artificial Sequence:  Nucleic Acid
  misc_feature (31)..(31): n stands for inosine
caucaaaccugaugaggccguuaggccgaancagcugc

SEQ ID NO: 1119 - RNA, 38 nt, Artificial Sequence
  Description of Artificial Sequence:  Nucleic Acid
  misc_feature (31)..(31): n stands for inosine
ggcccccacugaugaggccguuaggccgaanucuucau

SEQ ID NO: 1120 - RNA, 38 nt, Artificial Sequence
  Description of Artificial Sequence:  Nucleic Acid
  misc_feature (31)..(31): n stands for inosine
aggccccccugaugaggccguuaggccgaangucuuca

SEQ ID NO: 1121 - RNA, 38 nt, Artificial Sequence
  Description of Artificial Sequence:  Nucleic Acid
  misc_feature (31)..(31): n stands for inosine
ccaagcaacugaugaggccguuaggccgaancccccag

SEQ ID NO: 1122 - RNA, 38 nt, Artificial Sequence
  Description of Artificial Sequence:  Nucleic Acid
  misc_feature (31)..(31): n stands for inosine
gccaagcacugaugaggccguuaggccgaangccccca

SEQ ID NO: 1123 - RNA, 38 nt, Artificial Sequence
  Description of Artificial Sequence:  Nucleic Acid
  misc_feature (31)..(31): n stands for inosine
uguugccacugaugaggccguuaggccgaancaaggcc

SEQ ID NO: 1124 - RNA, 38 nt, Artificial Sequence
  Description of Artificial Sequence:  Nucleic Acid
  misc_feature (31)..(31): n stands for inosine
ugugcugucugaugaggccguuaggccgaanccaagca

SEQ ID NO: 1125 - RNA, 38 nt, Artificial Sequence
  Description of Artificial Sequence:  Nucleic Acid
  misc_feature (31)..(31): n stands for inosine
gucugugccugaugaggccguuaggccgaanuugccaa

SEQ ID NO: 1126 - RNA, 38 nt, Artificial Sequence
  Description of Artificial Sequence:  Nucleic Acid
  misc_feature (31)..(31): n stands for inosine
ugggucugcugaugaggccguuaggccgaancuguugc

SEQ ID NO: 1127 - RNA, 38 nt, Artificial Sequence
  Description of Artificial Sequence:  Nucleic Acid
  misc_feature (31)..(31): n stands for inosine
gcuggguccugaugaggccguuaggccgaanugcuguu

SEQ ID NO: 1128 - RNA, 38 nt, Artificial Sequence
  Description of Artificial Sequence:  Nucleic Acid
  misc_feature (31)..(31): n stands for inosine
cacagcugcugaugaggccguuaggccgaanucugugc

SEQ ID NO: 1129 - RNA, 38 nt, Artificial Sequence
  Description of Artificial Sequence:  Nucleic Acid
  misc_feature (31)..(31): n stands for inosine
acacagcucugaugaggccguuaggccgaangucugug

SEQ ID NO: 1130 - RNA, 38 nt, Artificial Sequence
  Description of Artificial Sequence:  Nucleic Acid
  misc_feature (31)..(31): n stands for inosine
aacacagccugaugaggccguuaggccgaanggucugu

SEQ ID NO: 1131 - RNA, 38 nt, Artificial Sequence
  Description of Artificial Sequence:  Nucleic Acid
  misc_feature (31)..(31): n stands for inosine
gugaacaccugaugaggccguuaggccgaancuggguc

SEQ ID NO: 1132 - RNA, 38 nt, Artificial Sequence
  Description of Artificial Sequence:  Nucleic Acid
  misc_feature (31)..(31): n stands for inosine
caggucugcugaugaggccguuaggccgaanaacacag

SEQ ID NO: 1133 - RNA, 38 nt, Artificial Sequence
  Description of Artificial Sequence:  Nucleic Acid
  misc_feature (31)..(31): n stands for inosine
gccagguccugaugaggccguuaggccgaanugaacac

SEQ ID NO: 1134 - RNA, 38 nt, Artificial Sequence
  Description of Artificial Sequence:  Nucleic Acid
  misc_feature (31)..(31): n stands for inosine
ggaugccacugaugaggccguuaggccgaanucuguga

SEQ ID NO: 1135 - RNA, 38 nt, Artificial Sequence
  Description of Artificial Sequence:  Nucleic Acid
  misc_feature (31)..(31): n stands for inosine
cggaugcccugaugaggccguuaggccgaangucugug

SEQ ID NO: 1136 - RNA, 38 nt, Artificial Sequence
  Description of Artificial Sequence:  Nucleic Acid
  misc_feature (31)..(31): n stands for inosine
ucgacggacugaugaggccguuaggccgaanccagguc

SEQ ID NO: 1137 - RNA, 38 nt, Artificial Sequence
  Description of Artificial Sequence:  Nucleic Acid
  misc_feature (31)..(31): n stands for inosine
uugucgaccugaugaggccguuaggccgaanaugccag

SEQ ID NO: 1138 - RNA, 38 nt, Artificial Sequence
  Description of Artificial Sequence:  Nucleic Acid
  misc_feature (31)..(31): n stands for inosine
cucggagucugaugaggccguuaggccgaanucgacgg

SEQ ID NO: 1139 - RNA, 38 nt, Artificial Sequence
  Description of Artificial Sequence:  Nucleic Acid
  misc_feature (31)..(31): n stands for inosine
aaacucggcugaugaggccguuaggccgaanuugucga

SEQ ID NO: 1140 - RNA, 38 nt, Artificial Sequence
  Description of Artificial Sequence:  Nucleic Acid
  misc_feature (31)..(31): n stands for inosine
ugaaacuccugaugaggccguuaggccgaanaguuguc

SEQ ID NO: 1141 - RNA, 38 nt, Artificial Sequence
  Description of Artificial Sequence:  Nucleic Acid
  misc_feature (31)..(31): n stands for inosine
gcagcugccugaugaggccguuaggccgaanaaacucg

SEQ ID NO: 1142 - RNA, 38 nt, Artificial Sequence
  Description of Artificial Sequence:  Nucleic Acid
  misc_feature (31)..(31): n stands for inosine
ucagcagccugaugaggccguuaggccgaancugaaac

SEQ ID NO: 1143 - RNA, 38 nt, Artificial Sequence
  Description of Artificial Sequence:  Nucleic Acid
  misc_feature (31)..(31): n stands for inosine
gguucagccugaugaggccguuaggccgaancugcuga

SEQ ID NO: 1144 - RNA, 38 nt, Artificial Sequence
  Description of Artificial Sequence:  Nucleic Acid
  misc_feature (31)..(31): n stands for inosine
ccugguuccugaugaggccguuaggccgaancagcugc

SEQ ID NO: 1145 - RNA, 38 nt, Artificial Sequence
  Description of Artificial Sequence:  Nucleic Acid
  misc_feature (31)..(31): n stands for inosine
uaugcccucugaugaggccguuaggccgaanuucagca

SEQ ID NO: 1146 - RNA, 38 nt, Artificial Sequence
  Description of Artificial Sequence:  Nucleic Acid
  misc_feature (31)..(31): n stands for inosine
guaugccccugaugaggccguuaggccgaanguucagc

SEQ ID NO: 1147 - RNA, 38 nt, Artificial Sequence
  Description of Artificial Sequence:  Nucleic Acid
  misc_feature (31)..(31): n stands for inosine
cacagguacugaugaggccguuaggccgaancccuggu

SEQ ID NO: 1148 - RNA, 38 nt, Artificial Sequence
  Description of Artificial Sequence:  Nucleic Acid
  misc_feature (31)..(31): n stands for inosine
gggccacacugaugaggccguuaggccgaanuaugccc

SEQ ID NO: 1149 - RNA, 38 nt, Artificial Sequence
  Description of Artificial Sequence:  Nucleic Acid
  misc_feature (31)..(31): n stands for inosine
ggggccaccugaugaggccguuaggccgaanguaugcc

SEQ ID NO: 1150 - RNA, 38 nt, Artificial Sequence
  Description of Artificial Sequence:  Nucleic Acid
  misc_feature (31)..(31): n stands for inosine
guguggggcugaugaggccguuaggccgaanccacagg

SEQ ID NO: 1151 - RNA, 38 nt, Artificial Sequence
  Description of Artificial Sequence:  Nucleic Acid
  misc_feature (31)..(31): n stands for inosine
ugugugggcugaugaggccguuaggccgaangccacag

SEQ ID NO: 1152 - RNA, 38 nt, Artificial Sequence
  Description of Artificial Sequence:  Nucleic Acid
  misc_feature (31)..(31): n stands for inosine
uuguguggcugaugaggccguuaggccgaanggccaca

SEQ ID NO: 1153 - RNA, 38 nt, Artificial Sequence
  Description of Artificial Sequence:  Nucleic Acid
  misc_feature (31)..(31): n stands for inosine
guugugugcugaugaggccguuaggccgaangggccac

SEQ ID NO: 1154 - RNA, 38 nt, Artificial Sequence
  Description of Artificial Sequence:  Nucleic Acid
  misc_feature (31)..(31): n stands for inosine
aguugugucugaugaggccguuaggccgaanggggcca

SEQ ID NO: 1155 - RNA, 38 nt, Artificial Sequence
  Description of Artificial Sequence:  Nucleic Acid
  misc_feature (31)..(31): n stands for inosine
caguugugcugaugaggccguuaggccgaangggggcc

SEQ ID NO: 1156 - RNA, 38 nt, Artificial Sequence
  Description of Artificial Sequence:  Nucleic Acid
  misc_feature (31)..(31): n stands for inosine
cucaguugcugaugaggccguuaggccgaanugggggg

SEQ ID NO: 1157 - RNA, 38 nt, Artificial Sequence
  Description of Artificial Sequence:  Nucleic Acid
  misc_feature (31)..(31): n stands for inosine
ggcucagucugaugaggccguuaggccgaanugugggg

SEQ ID NO: 1158 - RNA, 38 nt, Artificial Sequence
  Description of Artificial Sequence:  Nucleic Acid
  misc_feature (31)..(31): n stands for inosine
augggcuccugaugaggccguuaggccgaanuugugug

SEQ ID NO: 1159 - RNA, 38 nt, Artificial Sequence
  Description of Artificial Sequence:  Nucleic Acid
  misc_feature (31)..(31): n stands for inosine
ucagcaugcugaugaggccguuaggccgaancucaguu

SEQ ID NO: 1160 - RNA, 38 nt, Artificial Sequence
  Description of Artificial Sequence:  Nucleic Acid
  misc_feature (31)..(31): n stands for inosine
aucagcaucugaugaggccguuaggccgaangcucagu

SEQ ID NO: 1161 - RNA, 38 nt, Artificial Sequence
  Description of Artificial Sequence:  Nucleic Acid
  misc_feature (31)..(31): n stands for inosine
caucagcacugaugaggccguuaggccgaanggcucag

SEQ ID NO: 1162 - RNA, 38 nt, Artificial Sequence
  Description of Artificial Sequence:  Nucleic Acid
  misc_feature (31)..(31): n stands for inosine
acuccauccugaugaggccguuaggccgaancaugggc

SEQ ID NO: 1163 - RNA, 38 nt, Artificial Sequence
  Description of Artificial Sequence:  Nucleic Acid
  misc_feature (31)..(31): n stands for inosine
agccucagcugaugaggccguuaggccgaanuacucca

SEQ ID NO: 1164 - RNA, 38 nt, Artificial Sequence
  Description of Artificial Sequence:  Nucleic Acid
  misc_feature (31)..(31): n stands for inosine
uagccucacugaugaggccguuaggccgaanguacucc

SEQ ID NO: 1165 - RNA, 38 nt, Artificial Sequence
  Description of Artificial Sequence:  Nucleic Acid
  misc_feature (31)..(31): n stands for inosine
auagccuccugaugaggccguuaggccgaangguacuc

SEQ ID NO: 1166 - RNA, 38 nt, Artificial Sequence
  Description of Artificial Sequence:  Nucleic Acid
  misc_feature (31)..(31): n stands for inosine
cgaguuaucugaugaggccguuaggccgaanccucagg

SEQ ID NO: 1167 - RNA, 38 nt, Artificial Sequence
  Description of Artificial Sequence:  Nucleic Acid
  misc_feature (31)..(31): n stands for inosine
acuaggcgcugaugaggccguuaggccgaanuuauagc

SEQ ID NO: 1168 - RNA, 38 nt, Artificial Sequence
  Description of Artificial Sequence:  Nucleic Acid
  misc_feature (31)..(31): n stands for inosine
ugucacuacugaugaggccguuaggccgaancgaguua

SEQ ID NO: 1169 - RNA, 38 nt, Artificial Sequence
  Description of Artificial Sequence:  Nucleic Acid
  misc_feature (31)..(31): n stands for inosine
cugucacucugaugaggccguuaggccgaangcgaguu

SEQ ID NO: 1170 - RNA, 38 nt, Artificial Sequence
  Description of Artificial Sequence:  Nucleic Acid
  misc_feature (31)..(31): n stands for inosine
cucugggccugaugaggccguuaggccgaanucacuag

SEQ ID NO: 1171 - RNA, 38 nt, Artificial Sequence
  Description of Artificial Sequence:  Nucleic Acid
  misc_feature (31)..(31): n stands for inosine
ggccucugcugaugaggccguuaggccgaancugucac

SEQ ID NO: 1172 - RNA, 38 nt, Artificial Sequence
  Description of Artificial Sequence:  Nucleic Acid
  misc_feature (31)..(31): n stands for inosine
gggccucucugaugaggccguuaggccgaangcuguca

SEQ ID NO: 1173 - RNA, 38 nt, Artificial Sequence
  Description of Artificial Sequence:  Nucleic Acid
  misc_feature (31)..(31): n stands for inosine
ggggccuccugaugaggccguuaggccgaanggcuguc

SEQ ID NO: 1174 - RNA, 38 nt, Artificial Sequence
  Description of Artificial Sequence:  Nucleic Acid
  misc_feature (31)..(31): n stands for inosine
ggucggggcugaugaggccguuaggccgaanccucugg

SEQ ID NO: 1175 - RNA, 38 nt, Artificial Sequence
  Description of Artificial Sequence:  Nucleic Acid
  misc_feature (31)..(31): n stands for inosine
gggucgggcugaugaggccguuaggccgaangccucug

SEQ ID NO: 1176 - RNA, 38 nt, Artificial Sequence
  Description of Artificial Sequence:  Nucleic Acid
  misc_feature (31)..(31): n stands for inosine
ugggucggcugaugaggccguuaggccgaanggccucu

SEQ ID NO: 1177 - RNA, 38 nt, Artificial Sequence
  Description of Artificial Sequence:  Nucleic Acid
  misc_feature (31)..(31): n stands for inosine
cugggucgcugaugaggccguuaggccgaangggccuc

SEQ ID NO: 1178 - RNA, 38 nt, Artificial Sequence
  Description of Artificial Sequence:  Nucleic Acid
  misc_feature (31)..(31): n stands for inosine
gcuggguccugaugaggccguuaggccgaanggggccu

SEQ ID NO: 1179 - RNA, 38 nt, Artificial Sequence
  Description of Artificial Sequence:  Nucleic Acid
  misc_feature (31)..(31): n stands for inosine
aggagcugcugaugaggccguuaggccgaanucggggg

SEQ ID NO: 1180 - RNA, 38 nt, Artificial Sequence
  Description of Artificial Sequence:  Nucleic Acid
  misc_feature (31)..(31): n stands for inosine
caggagcucugaugaggccguuaggccgaangucgggg

SEQ ID NO: 1181 - RNA, 38 nt, Artificial Sequence
  Description of Artificial Sequence:  Nucleic Acid
  misc_feature (31)..(31): n stands for inosine
gcaggagccugaugaggccguuaggccgaanggucggg

SEQ ID NO: 1182 - RNA, 38 nt, Artificial Sequence
  Description of Artificial Sequence:  Nucleic Acid
  misc_feature (31)..(31): n stands for inosine
ggagcaggcugaugaggccguuaggccgaancuggguc

SEQ ID NO: 1183 - RNA, 38 nt, Artificial Sequence
  Description of Artificial Sequence:  Nucleic Acid
  misc_feature (31)..(31): n stands for inosine
guggagcacugaugaggccguuaggccgaanagcuggg

SEQ ID NO: 1184 - RNA, 38 nt, Artificial Sequence
  Description of Artificial Sequence:  Nucleic Acid
  misc_feature (31)..(31): n stands for inosine
aguggagccugaugaggccguuaggccgaangagcugg

SEQ ID NO: 1185 - RNA, 38 nt, Artificial Sequence
  Description of Artificial Sequence:  Nucleic Acid
  misc_feature (31)..(31): n stands for inosine
cccaguggcugaugaggccguuaggccgaancaggagc

SEQ ID NO: 1186 - RNA, 38 nt, Artificial Sequence
  Description of Artificial Sequence:  Nucleic Acid
  misc_feature (31)..(31): n stands for inosine
cccccagucugaugaggccguuaggccgaanagcagga

SEQ ID NO: 1187 - RNA, 38 nt, Artificial Sequence
  Description of Artificial Sequence:  Nucleic Acid
  misc_feature (31)..(31): n stands for inosine
gcccccagcugaugaggccguuaggccgaangagcagg

SEQ ID NO: 1188 - RNA, 38 nt, Artificial Sequence
  Description of Artificial Sequence:  Nucleic Acid
  misc_feature (31)..(31): n stands for inosine
gggccccccugaugaggccguuaggccgaanuggagca

SEQ ID NO: 1189 - RNA, 38 nt, Artificial Sequence
  Description of Artificial Sequence:  Nucleic Acid
  misc_feature (31)..(31): n stands for inosine
agccccggcugaugaggccguuaggccgaancccccag

SEQ ID NO: 1190 - RNA, 38 nt, Artificial Sequence
  Description of Artificial Sequence:  Nucleic Acid
  misc_feature (31)..(31): n stands for inosine
gagccccgcugaugaggccguuaggccgaangccccca

SEQ ID NO: 1191 - RNA, 38 nt, Artificial Sequence
  Description of Artificial Sequence:  Nucleic Acid
  misc_feature (31)..(31): n stands for inosine
ggagcccccugaugaggccguuaggccgaanggccccc

SEQ ID NO: 1192 - RNA, 38 nt, Artificial Sequence
  Description of Artificial Sequence:  Nucleic Acid
  misc_feature (31)..(31): n stands for inosine
cauuggggcugaugaggccguuaggccgaanccccggg

SEQ ID NO: 1193 - RNA, 38 nt, Artificial Sequence
  Description of Artificial Sequence:  Nucleic Acid
  misc_feature (31)..(31): n stands for inosine
gccauuggcugaugaggccguuaggccgaanagccccg

SEQ ID NO: 1194 - RNA, 38 nt, Artificial Sequence
  Description of Artificial Sequence:  Nucleic Acid
  misc_feature (31)..(31): n stands for inosine
ggccauugcugaugaggccguuaggccgaangagcccc

SEQ ID NO: 1195 - RNA, 38 nt, Artificial Sequence
  Description of Artificial Sequence:  Nucleic Acid
  misc_feature (31)..(31): n stands for inosine
aggccauucugaugaggccguuaggccgaanggagccc

SEQ ID NO: 1196 - RNA, 38 nt, Artificial Sequence
  Description of Artificial Sequence:  Nucleic Acid
  misc_feature (31)..(31): n stands for inosine
gaggccaucugaugaggccguuaggccgaangggagcc

SEQ ID NO: 1197 - RNA, 38 nt, Artificial Sequence
  Description of Artificial Sequence:  Nucleic Acid
  misc_feature (31)..(31): n stands for inosine
ugaaaggacugaugaggccguuaggccgaanccauugg

SEQ ID NO: 1198 - RNA, 38 nt, Artificial Sequence
  Description of Artificial Sequence:  Nucleic Acid
  misc_feature (31)..(31): n stands for inosine
cugaaaggcugaugaggccguuaggccgaangccauug

SEQ ID NO: 1199 - RNA, 38 nt, Artificial Sequence
  Description of Artificial Sequence:  Nucleic Acid
  misc_feature (31)..(31): n stands for inosine
uccugaaacugaugaggccguuaggccgaanaggccau

SEQ ID NO: 1200 - RNA, 38 nt, Artificial Sequence
  Description of Artificial Sequence:  Nucleic Acid
  misc_feature (31)..(31): n stands for inosine
cuccugaacugaugaggccguuaggccgaangaggcca

SEQ ID NO: 1201 - RNA, 38 nt, Artificial Sequence
  Description of Artificial Sequence:  Nucleic Acid
  misc_feature (31)..(31): n stands for inosine
ucaucucccugaugaggccguuaggccgaanaaaggag

SEQ ID NO: 1202 - RNA, 38 nt, Artificial Sequence
  Description of Artificial Sequence:  Nucleic Acid
  misc_feature (31)..(31): n stands for inosine
ggaggagacugaugaggccguuaggccgaanucuucau

SEQ ID NO: 1203 - RNA, 38 nt, Artificial Sequence
  Description of Artificial Sequence:  Nucleic Acid
  misc_feature (31)..(31): n stands for inosine
aauggaggcugaugaggccguuaggccgaanaagucuu

SEQ ID NO: 1204 - RNA, 38 nt, Artificial Sequence
  Description of Artificial Sequence:  Nucleic Acid
  misc_feature (31)..(31): n stands for inosine
gcaauggacugaugaggccguuaggccgaanagaaguc

SEQ ID NO: 1205 - RNA, 38 nt, Artificial Sequence
  Description of Artificial Sequence:  Nucleic Acid
  misc_feature (31)..(31): n stands for inosine
cgcaauggcugaugaggccguuaggccgaangagaagu

SEQ ID NO: 1206 - RNA, 38 nt, Artificial Sequence
  Description of Artificial Sequence:  Nucleic Acid
  misc_feature (31)..(31): n stands for inosine
uccgcaaucugaugaggccguuaggccgaanaggagaa

SEQ ID NO: 1207 - RNA, 38 nt, Artificial Sequence
  Description of Artificial Sequence:  Nucleic Acid
  misc_feature (31)..(31): n stands for inosine
guccgcaacugaugaggccguuaggccgaangaggaga

SEQ ID NO: 1208 - RNA, 38 nt, Artificial Sequence
  Description of Artificial Sequence:  Nucleic Acid
  misc_feature (31)..(31): n stands for inosine
gaaguccacugaugaggccguuaggccgaanuccgcaa

SEQ ID NO: 1209 - RNA, 38 nt, Artificial Sequence
  Description of Artificial Sequence:  Nucleic Acid
  misc_feature (31)..(31): n stands for inosine
ggcugagacugaugaggccguuaggccgaanuccaugu

SEQ ID NO: 1210 - RNA, 38 nt, Artificial Sequence
  Description of Artificial Sequence:  Nucleic Acid
  misc_feature (31)..(31): n stands for inosine
cagggcugcugaugaggccguuaggccgaanaagucca

SEQ ID NO: 1211 - RNA, 38 nt, Artificial Sequence
  Description of Artificial Sequence:  Nucleic Acid
  misc_feature (31)..(31): n stands for inosine
agcagggccugaugaggccguuaggccgaanagaaguc

SEQ ID NO: 1212 - RNA, 38 nt, Artificial Sequence
  Description of Artificial Sequence:  Nucleic Acid
  misc_feature (31)..(31): n stands for inosine
cucagcagcugaugaggccguuaggccgaancugagaa

SEQ ID NO: 1213 - RNA, 38 nt, Artificial Sequence
  Description of Artificial Sequence:  Nucleic Acid
  misc_feature (31)..(31): n stands for inosine
acucagcacugaugaggccguuaggccgaangcugaga

SEQ ID NO: 1214 - RNA, 38 nt, Artificial Sequence
  Description of Artificial Sequence:  Nucleic Acid
  misc_feature (31)..(31): n stands for inosine
gacucagccugaugaggccguuaggccgaanggcugag

SEQ ID NO: 1215 - RNA, 38 nt, Artificial Sequence
  Description of Artificial Sequence:  Nucleic Acid
  misc_feature (31)..(31): n stands for inosine
ucugacuccugaugaggccguuaggccgaancagggcu

SEQ ID NO: 1216 - RNA, 38 nt, Artificial Sequence
  Description of Artificial Sequence:  Nucleic Acid
  misc_feature (31)..(31): n stands for inosine
agcugauccugaugaggccguuaggccgaanacucagc

SEQ ID NO: 1217 - RNA, 38 nt, Artificial Sequence
  Description of Artificial Sequence:  Nucleic Acid
  misc_feature (31)..(31): n stands for inosine
uuaggagccugaugaggccguuaggccgaanaucugac

SEQ ID NO: 1218 - RNA, 38 nt, Artificial Sequence
  Description of Artificial Sequence:  Nucleic Acid
  misc_feature (31)..(31): n stands for inosine
cccuuaggcugaugaggccguuaggccgaancugaucu

SEQ ID NO: 1219 - RNA, 38 nt, Artificial Sequence
  Description of Artificial Sequence:  Nucleic Acid
  misc_feature (31)..(31): n stands for inosine
cccccuuacugaugaggccguuaggccgaanagcugau

SEQ ID NO: 1220 - RNA, 38 nt, Artificial Sequence
  Description of Artificial Sequence:  Nucleic Acid
  misc_feature (31)..(31): n stands for inosine
acccccuucugaugaggccguuaggccgaangagcuga

SEQ ID NO: 1221 - RNA, 38 nt, Artificial Sequence
  Description of Artificial Sequence:  Nucleic Acid
  misc_feature (31)..(31): n stands for inosine
ggagggcacugaugaggccguuaggccgaancgucacc

SEQ ID NO: 1222 - RNA, 38 nt, Artificial Sequence
  Description of Artificial Sequence:  Nucleic Acid
  misc_feature (31)..(31): n stands for inosine
gggagggccugaugaggccguuaggccgaangcgucac

SEQ ID NO: 1223 - RNA, 38 nt, Artificial Sequence
  Description of Artificial Sequence:  Nucleic Acid
  misc_feature (31)..(31): n stands for inosine
cuggggagcugaugaggccguuaggccgaancaggcgu

SEQ ID NO: 1224 - RNA, 38 nt, Artificial Sequence
  Description of Artificial Sequence:  Nucleic Acid
  misc_feature (31)..(31): n stands for inosine
ucuggggacugaugaggccguuaggccgaangcaggcg

SEQ ID NO: 1225 - RNA, 38 nt, Artificial Sequence
  Description of Artificial Sequence:  Nucleic Acid
  misc_feature (31)..(31): n stands for inosine
cucuggggcugaugaggccguuaggccgaanggcaggc

SEQ ID NO: 1226 - RNA, 38 nt, Artificial Sequence
  Description of Artificial Sequence:  Nucleic Acid
  misc_feature (31)..(31): n stands for inosine
ugcucuggcugaugaggccguuaggccgaanagggcag

SEQ ID NO: 1227 - RNA, 38 nt, Artificial Sequence
  Description of Artificial Sequence:  Nucleic Acid
  misc_feature (31)..(31): n stands for inosine
gugcucugcugaugaggccguuaggccgaangagggca

SEQ ID NO: 1228 - RNA, 38 nt, Artificial Sequence
  Description of Artificial Sequence:  Nucleic Acid
  misc_feature (31)..(31): n stands for inosine
agugcucucugaugaggccguuaggccgaanggagggc

SEQ ID NO: 1229 - RNA, 38 nt, Artificial Sequence
  Description of Artificial Sequence:  Nucleic Acid
  misc_feature (31)..(31): n stands for inosine
cagugcuccugaugaggccguuaggccgaangggaggg

SEQ ID NO: 1230 - RNA, 38 nt, Artificial Sequence
  Description of Artificial Sequence:  Nucleic Acid
  misc_feature (31)..(31): n stands for inosine
gcaaccagcugaugaggccguuaggccgaancucuggg

SEQ ID NO: 1231 - RNA, 38 nt, Artificial Sequence
  Description of Artificial Sequence:  Nucleic Acid
  misc_feature (31)..(31): n stands for inosine
cugcaacccugaugaggccguuaggccgaanugcucug

SEQ ID NO: 1232 - RNA, 38 nt, Artificial Sequence
  Description of Artificial Sequence:  Nucleic Acid
  misc_feature (31)..(31): n stands for inosine
caaucccccugaugaggccguuaggccgaancaaccag

SEQ ID NO: 1233 - RNA, 38 nt, Artificial Sequence
  Description of Artificial Sequence:  Nucleic Acid
  misc_feature (31)..(31): n stands for inosine
uuuuggagcugaugaggccguuaggccgaancuucaau

SEQ ID NO: 1234 - RNA, 38 nt, Artificial Sequence
  Description of Artificial Sequence:  Nucleic Acid
  misc_feature (31)..(31): n stands for inosine
cuuuuggacugaugaggccguuaggccgaangcuucaa

SEQ ID NO: 1235 - RNA, 38 nt, Artificial Sequence
  Description of Artificial Sequence:  Nucleic Acid
  misc_feature (31)..(31): n stands for inosine
gcuuuuggcugaugaggccguuaggccgaanggcuuca

SEQ ID NO: 1236 - RNA, 38 nt, Artificial Sequence
  Description of Artificial Sequence:  Nucleic Acid
  misc_feature (31)..(31): n stands for inosine
gugcuuuucugaugaggccguuaggccgaanagggcuu

SEQ ID NO: 1237 - RNA, 38 nt, Artificial Sequence
  Description of Artificial Sequence:  Nucleic Acid
  misc_feature (31)..(31): n stands for inosine
agugcuuucugaugaggccguuaggccgaangagggcu

SEQ ID NO: 1238 - RNA, 38 nt, Artificial Sequence
  Description of Artificial Sequence:  Nucleic Acid
  misc_feature (31)..(31): n stands for inosine
uccguaagcugaugaggccguuaggccgaancuuuugg

SEQ ID NO: 1239 - RNA, 38 nt, Artificial Sequence
  Description of Artificial Sequence:  Nucleic Acid
  misc_feature (31)..(31): n stands for inosine
aauccguacugaugaggccguuaggccgaanugcuuuu

SEQ ID NO: 1240 - RNA, 38 nt, Artificial Sequence
  Description of Artificial Sequence:  Nucleic Acid
  misc_feature (31)..(31): n stands for inosine
accccacccugaugaggccguuaggccgaanaauccgu

SEQ ID NO: 1241 - RNA, 38 nt, Artificial Sequence
  Description of Artificial Sequence:  Nucleic Acid
  misc_feature (31)..(31): n stands for inosine
gggcaguucugaugaggccguuaggccgaanaacacac

SEQ ID NO: 1242 - RNA, 38 nt, Artificial Sequence
  Description of Artificial Sequence:  Nucleic Acid
  misc_feature (31)..(31): n stands for inosine
ggggcagucugaugaggccguuaggccgaangaacaca

SEQ ID NO: 1243 - RNA, 38 nt, Artificial Sequence
  Description of Artificial Sequence:  Nucleic Acid
  misc_feature (31)..(31): n stands for inosine
uugggggccugaugaggccguuaggccgaanuuggaac

SEQ ID NO: 1244 - RNA, 38 nt, Artificial Sequence
  Description of Artificial Sequence:  Nucleic Acid
  misc_feature (31)..(31): n stands for inosine
aaguugggcugaugaggccguuaggccgaancaguugg

SEQ ID NO: 1245 - RNA, 38 nt, Artificial Sequence
  Description of Artificial Sequence:  Nucleic Acid
  misc_feature (31)..(31): n stands for inosine
aaaguuggcugaugaggccguuaggccgaangcaguug

SEQ ID NO: 1246 - RNA, 38 nt, Artificial Sequence
  Description of Artificial Sequence:  Nucleic Acid
  misc_feature (31)..(31): n stands for inosine
caaaguugcugaugaggccguuaggccgaanggcaguu

SEQ ID NO: 1247 - RNA, 38 nt, Artificial Sequence
  Description of Artificial Sequence:  Nucleic Acid
  misc_feature (31)..(31): n stands for inosine
acaaaguucugaugaggccguuaggccgaangggcagu

SEQ ID NO: 1248 - RNA, 38 nt, Artificial Sequence
  Description of Artificial Sequence:  Nucleic Acid
  misc_feature (31)..(31): n stands for inosine
cacaaagucugaugaggccguuaggccgaanggggcag

SEQ ID NO: 1249 - RNA, 38 nt, Artificial Sequence
  Description of Artificial Sequence:  Nucleic Acid
  misc_feature (31)..(31): n stands for inosine
auccacaacugaugaggccguuaggccgaanuuggggg

SEQ ID NO: 1250 - RNA, 38 nt, Artificial Sequence
  Description of Artificial Sequence:  Nucleic Acid
  misc_feature (31)..(31): n stands for inosine
uccaaggacugaugaggccguuaggccgaanacaucca

SEQ ID NO: 1251 - RNA, 38 nt, Artificial Sequence
  Description of Artificial Sequence:  Nucleic Acid
  misc_feature (31)..(31): n stands for inosine
cccuccaacugaugaggccguuaggccgaanaagacau

SEQ ID NO: 1252 - RNA, 38 nt, Artificial Sequence
  Description of Artificial Sequence:  Nucleic Acid
  misc_feature (31)..(31): n stands for inosine
ccccuccacugaugaggccguuaggccgaangaagaca

SEQ ID NO: 1253 - RNA, 38 nt, Artificial Sequence
  Description of Artificial Sequence:  Nucleic Acid
  misc_feature (31)..(31): n stands for inosine
uaaaauaucugaugaggccguuaggccgaancuccccc

SEQ ID NO: 1254 - RNA, 38 nt, Artificial Sequence
  Description of Artificial Sequence:  Nucleic Acid
  misc_feature (31)..(31): n stands for inosine
auaaaauacugaugaggccguuaggccgaangcucccc

SEQ ID NO: 1255 - RNA, 38 nt, Artificial Sequence
  Description of Artificial Sequence:  Nucleic Acid
  misc_feature (31)..(31): n stands for inosine
acaauaaacugaugaggccguuaggccgaanaauaaaa

SEQ ID NO: 1256 - RNA, 38 nt, Artificial Sequence
  Description of Artificial Sequence:  Nucleic Acid
  misc_feature (31)..(31): n stands for inosine
acagauaccugaugaggccguuaggccgaanacaauaa

SEQ ID NO: 1257 - RNA, 38 nt, Artificial Sequence
  Description of Artificial Sequence:  Nucleic Acid
  misc_feature (31)..(31): n stands for inosine
agagauaccugaugaggccguuaggccgaanauacuga

SEQ ID NO: 1258 - RNA, 38 nt, Artificial Sequence
  Description of Artificial Sequence:  Nucleic Acid
  misc_feature (31)..(31): n stands for inosine
agagagagcugaugaggccguuaggccgaanauacaga

SEQ ID NO: 1259 - RNA, 38 nt, Artificial Sequence
  Description of Artificial Sequence:  Nucleic Acid
  misc_feature (31)..(31): n stands for inosine
aaagagagcugaugaggccguuaggccgaanagauaca

SEQ ID NO: 1260 - RNA, 38 nt, Artificial Sequence
  Description of Artificial Sequence:  Nucleic Acid
  misc_feature (31)..(31): n stands for inosine
aaaaagagcugaugaggccguuaggccgaanagagaua

SEQ ID NO: 1261 - RNA, 38 nt, Artificial Sequence
  Description of Artificial Sequence:  Nucleic Acid
  misc_feature (31)..(31): n stands for inosine
ccaaaaagcugaugaggccguuaggccgaanagagaga

SEQ ID NO: 1262 - RNA, 38 nt, Artificial Sequence
  Description of Artificial Sequence:  Nucleic Acid
  misc_feature (31)..(31): n stands for inosine
cuccaaaacugaugaggccguuaggccgaanagagaga

SEQ ID NO: 1263 - RNA, 38 nt, Artificial Sequence
  Description of Artificial Sequence:  Nucleic Acid
  misc_feature (31)..(31): n stands for inosine
ucugcuuacugaugaggccguuaggccgaancaccucc

SEQ ID NO: 1264 - RNA, 38 nt, Artificial Sequence
  Description of Artificial Sequence:  Nucleic Acid
  misc_feature (31)..(31): n stands for inosine
aaugcuuccugaugaggccguuaggccgaancuuaagc

SEQ ID NO: 1265 - RNA, 38 nt, Artificial Sequence
  Description of Artificial Sequence:  Nucleic Acid
  misc_feature (31)..(31): n stands for inosine
gaaguuaacugaugaggccguuaggccgaancuucugc

SEQ ID NO: 1266 - RNA, 38 nt, Artificial Sequence
  Description of Artificial Sequence:  Nucleic Acid
  misc_feature (31)..(31): n stands for inosine
uccagagacugaugaggccguuaggccgaanuuaaugc

SEQ ID NO: 1267 - RNA, 38 nt, Artificial Sequence
  Description of Artificial Sequence:  Nucleic Acid
  misc_feature (31)..(31): n stands for inosine
cuuuccagcugaugaggccguuaggccgaanaaguuaa

SEQ ID NO: 1268 - RNA, 38 nt, Artificial Sequence
  Description of Artificial Sequence:  Nucleic Acid
  misc_feature (31)..(31): n stands for inosine
cccuuucccugaugaggccguuaggccgaanagaaguu

SEQ ID NO: 1269 - RNA, 38 nt, Artificial Sequence
  Description of Artificial Sequence:  Nucleic Acid
  misc_feature (31)..(31): n stands for inosine
guuucccccugaugaggccguuaggccgaancuccccc

SEQ ID NO: 1270 - RNA, 38 nt, Artificial Sequence
  Description of Artificial Sequence:  Nucleic Acid
  misc_feature (31)..(31): n stands for inosine
aaaguuugcugaugaggccguuaggccgaanuuucccc

SEQ ID NO: 1271 - RNA, 38 nt, Artificial Sequence
  Description of Artificial Sequence:  Nucleic Acid
  misc_feature (31)..(31): n stands for inosine
gaaaaguucugaugaggccguuaggccgaanaguuucc

SEQ ID NO: 1272 - RNA, 38 nt, Artificial Sequence
  Description of Artificial Sequence:  Nucleic Acid
  misc_feature (31)..(31): n stands for inosine
aggggaaacugaugaggccguuaggccgaanuuugagu

SEQ ID NO: 1273 - RNA, 38 nt, Artificial Sequence
  Description of Artificial Sequence:  Nucleic Acid
  misc_feature (31)..(31): n stands for inosine
aggacaggcugaugaggccguuaggccgaanaaaaguu

SEQ ID NO: 1274 - RNA, 38 nt, Artificial Sequence
  Description of Artificial Sequence:  Nucleic Acid
  misc_feature (31)..(31): n stands for inosine
caggacagcugaugaggccguuaggccgaangaaaagu

SEQ ID NO: 1275 - RNA, 38 nt, Artificial Sequence
  Description of Artificial Sequence:  Nucleic Acid
  misc_feature (31)..(31): n stands for inosine
ucaggacacugaugaggccguuaggccgaanggaaaag

SEQ ID NO: 1276 - RNA, 38 nt, Artificial Sequence
  Description of Artificial Sequence:  Nucleic Acid
  misc_feature (31)..(31): n stands for inosine
aucaggaccugaugaggccguuaggccgaangggaaaa

SEQ ID NO: 1277 - RNA, 38 nt, Artificial Sequence
  Description of Artificial Sequence:  Nucleic Acid
  misc_feature (31)..(31): n stands for inosine
gaccaucacugaugaggccguuaggccgaanacagggg

SEQ ID NO: 1278 - RNA, 38 nt, Artificial Sequence
  Description of Artificial Sequence:  Nucleic Acid
  misc_feature (31)..(31): n stands for inosine
ugaccauccugaugaggccguuaggccgaangacaggg

SEQ ID NO: 1279 - RNA, 38 nt, Artificial Sequence
  Description of Artificial Sequence:  Nucleic Acid
  misc_feature (31)..(31): n stands for inosine
aagggagccugaugaggccguuaggccgaanaccauca

SEQ ID NO: 1280 - RNA, 38 nt, Artificial Sequence
  Description of Artificial Sequence:  Nucleic Acid
  misc_feature (31)..(31): n stands for inosine
gagaagggcugaugaggccguuaggccgaancugacca

SEQ ID NO: 1281 - RNA, 38 nt, Artificial Sequence
  Description of Artificial Sequence:  Nucleic Acid
  misc_feature (31)..(31): n stands for inosine
cagagaagcugaugaggccguuaggccgaanagcugac

SEQ ID NO: 1282 - RNA, 38 nt, Artificial Sequence
  Description of Artificial Sequence:  Nucleic Acid
  misc_feature (31)..(31): n stands for inosine
acagagaacugaugaggccguuaggccgaangagcuga

SEQ ID NO: 1283 - RNA, 38 nt, Artificial Sequence
  Description of Artificial Sequence:  Nucleic Acid
  misc_feature (31)..(31): n stands for inosine
uacagagacugaugaggccguuaggccgaanggagcug

SEQ ID NO: 1284 - RNA, 38 nt, Artificial Sequence
  Description of Artificial Sequence:  Nucleic Acid
  misc_feature (31)..(31): n stands for inosine
cccuacagcugaugaggccguuaggccgaanaagggag

SEQ ID NO: 1285 - RNA, 38 nt, Artificial Sequence
  Description of Artificial Sequence:  Nucleic Acid
  misc_feature (31)..(31): n stands for inosine
uucccuaccugaugaggccguuaggccgaanagaaggg

SEQ ID NO: 1286 - RNA, 38 nt, Artificial Sequence
  Description of Artificial Sequence:  Nucleic Acid
  misc_feature (31)..(31): n stands for inosine
gaccccaccugaugaggccguuaggccgaanuucccua

SEQ ID NO: 1287 - RNA, 38 nt, Artificial Sequence
  Description of Artificial Sequence:  Nucleic Acid
  misc_feature (31)..(31): n stands for inosine
gggaugggcugaugaggccguuaggccgaanaccccac

SEQ ID NO: 1288 - RNA, 38 nt, Artificial Sequence
  Description of Artificial Sequence:  Nucleic Acid
  misc_feature (31)..(31): n stands for inosine
ggggauggcugaugaggccguuaggccgaangacccca

SEQ ID NO: 1289 - RNA, 38 nt, Artificial Sequence
  Description of Artificial Sequence:  Nucleic Acid
  misc_feature (31)..(31): n stands for inosine
uggggaugcugaugaggccguuaggccgaanggacccc

SEQ ID NO: 1290 - RNA, 38 nt, Artificial Sequence
  Description of Artificial Sequence:  Nucleic Acid
  misc_feature (31)..(31): n stands for inosine
auggggaucugaugaggccguuaggccgaangggaccc

SEQ ID NO: 1291 - RNA, 38 nt, Artificial Sequence
  Description of Artificial Sequence:  Nucleic Acid
  misc_feature (31)..(31): n stands for inosine
gauggggacugaugaggccguuaggccgaanggggacc

SEQ ID NO: 1292 - RNA, 38 nt, Artificial Sequence
  Description of Artificial Sequence:  Nucleic Acid
  misc_feature (31)..(31): n stands for inosine
gaggauggcugaugaggccguuaggccgaanauggggg

SEQ ID NO: 1293 - RNA, 38 nt, Artificial Sequence
  Description of Artificial Sequence:  Nucleic Acid
  misc_feature (31)..(31): n stands for inosine
ggaggaugcugaugaggccguuaggccgaangaugggg

SEQ ID NO: 1294 - RNA, 38 nt, Artificial Sequence
  Description of Artificial Sequence:  Nucleic Acid
  misc_feature (31)..(31): n stands for inosine
uggaggaucugaugaggccguuaggccgaanggauggg

SEQ ID NO: 1295 - RNA, 38 nt, Artificial Sequence
  Description of Artificial Sequence:  Nucleic Acid
  misc_feature (31)..(31): n stands for inosine
cuggaggacugaugaggccguuaggccgaangggaugg

SEQ ID NO: 1296 - RNA, 38 nt, Artificial Sequence
  Description of Artificial Sequence:  Nucleic Acid
  misc_feature (31)..(31): n stands for inosine
aagcuggacugaugaggccguuaggccgaanaugggga

SEQ ID NO: 1297 - RNA, 38 nt, Artificial Sequence
  Description of Artificial Sequence:  Nucleic Acid
  misc_feature (31)..(31): n stands for inosine
gaagcuggcugaugaggccguuaggccgaangaugggg

SEQ ID NO: 1298 - RNA, 38 nt, Artificial Sequence
  Description of Artificial Sequence:  Nucleic Acid
  misc_feature (31)..(31): n stands for inosine
cagaagcucugaugaggccguuaggccgaanaggaugg

SEQ ID NO: 1299 - RNA, 38 nt, Artificial Sequence
  Description of Artificial Sequence:  Nucleic Acid
  misc_feature (31)..(31): n stands for inosine
ccagaagccugaugaggccguuaggccgaangaggaug

SEQ ID NO: 1300 - RNA, 38 nt, Artificial Sequence
  Description of Artificial Sequence:  Nucleic Acid
  misc_feature (31)..(31): n stands for inosine
guaccagacugaugaggccguuaggccgaancuggagg

SEQ ID NO: 1301 - RNA, 38 nt, Artificial Sequence
  Description of Artificial Sequence:  Nucleic Acid
  misc_feature (31)..(31): n stands for inosine
agaguacccugaugaggccguuaggccgaanaagcugg

SEQ ID NO: 1302 - RNA, 38 nt, Artificial Sequence
  Description of Artificial Sequence:  Nucleic Acid
  misc_feature (31)..(31): n stands for inosine
ucuaggagcugaugaggccguuaggccgaanuaccaga

SEQ ID NO: 1303 - RNA, 38 nt, Artificial Sequence
  Description of Artificial Sequence:  Nucleic Acid
  misc_feature (31)..(31): n stands for inosine
ucucuaggcugaugaggccguuaggccgaanaguacca

SEQ ID NO: 1304 - RNA, 38 nt, Artificial Sequence
  Description of Artificial Sequence:  Nucleic Acid
  misc_feature (31)..(31): n stands for inosine
ugucucuacugaugaggccguuaggccgaanagaguac

SEQ ID NO: 1305 - RNA, 38 nt, Artificial Sequence
  Description of Artificial Sequence:  Nucleic Acid
  misc_feature (31)..(31): n stands for inosine
cugucucucugaugaggccguuaggccgaangagagua

SEQ ID NO: 1306 - RNA, 38 nt, Artificial Sequence
  Description of Artificial Sequence:  Nucleic Acid
  misc_feature (31)..(31): n stands for inosine
ccugcuuccugaugaggccguuaggccgaanucucuag

SEQ ID NO: 1307 - RNA, 38 nt, Artificial Sequence
  Description of Artificial Sequence:  Nucleic Acid
  misc_feature (31)..(31): n stands for inosine
cuccagcccugaugaggccguuaggccgaancuucugu

SEQ ID NO: 1308 - RNA, 38 nt, Artificial Sequence
  Description of Artificial Sequence:  Nucleic Acid
  misc_feature (31)..(31): n stands for inosine
uuaccucccugaugaggccguuaggccgaanccugcuu

SEQ ID NO: 1309 - RNA, 38 nt, Artificial Sequence
  Description of Artificial Sequence:  Nucleic Acid
  misc_feature (31)..(31): n stands for inosine
ggcucaaacugaugaggccguuaggccgaanccuuacc

SEQ ID NO: 1310 - RNA, 38 nt, Artificial Sequence
  Description of Artificial Sequence:  Nucleic Acid
  misc_feature (31)..(31): n stands for inosine
gggcucaacugaugaggccguuaggccgaangccuuac

SEQ ID NO: 1311 - RNA, 38 nt, Artificial Sequence
  Description of Artificial Sequence:  Nucleic Acid
  misc_feature (31)..(31): n stands for inosine
gcuuugugcugaugaggccguuaggccgaancucaaag

SEQ ID NO: 1312 - RNA, 38 nt, Artificial Sequence
  Description of Artificial Sequence:  Nucleic Acid
  misc_feature (31)..(31): n stands for inosine
ggcuuugucugaugaggccguuaggccgaangcucaaa

SEQ ID NO: 1313 - RNA, 38 nt, Artificial Sequence
  Description of Artificial Sequence:  Nucleic Acid
  misc_feature (31)..(31): n stands for inosine
aggcuuugcugaugaggccguuaggccgaanggcucaa

SEQ ID NO: 1314 - RNA, 38 nt, Artificial Sequence
  Description of Artificial Sequence:  Nucleic Acid
  misc_feature (31)..(31): n stands for inosine
uaaggcuucugaugaggccguuaggccgaanugggcuc

SEQ ID NO: 1315 - RNA, 38 nt, Artificial Sequence
  Description of Artificial Sequence:  Nucleic Acid
  misc_feature (31)..(31): n stands for inosine
cuugauaacugaugaggccguuaggccgaancuuugug

SEQ ID NO: 1316 - RNA, 38 nt, Artificial Sequence
  Description of Artificial Sequence:  Nucleic Acid
  misc_feature (31)..(31): n stands for inosine
acuugauacugaugaggccguuaggccgaangcuuugu

SEQ ID NO: 1317 - RNA, 38 nt, Artificial Sequence
  Description of Artificial Sequence:  Nucleic Acid
  misc_feature (31)..(31): n stands for inosine
aagacacucugaugaggccguuaggccgaanauaaggc

SEQ ID NO: 1318 - RNA, 38 nt, Artificial Sequence
  Description of Artificial Sequence:  Nucleic Acid
  misc_feature (31)..(31): n stands for inosine
augauggacugaugaggccguuaggccgaanacacuug

SEQ ID NO: 1319 - RNA, 38 nt, Artificial Sequence
  Description of Artificial Sequence:  Nucleic Acid
  misc_feature (31)..(31): n stands for inosine
uccaugaucugaugaggccguuaggccgaanaagacac

SEQ ID NO: 1320 - RNA, 38 nt, Artificial Sequence
  Description of Artificial Sequence:  Nucleic Acid
  misc_feature (31)..(31): n stands for inosine
auccaugacugaugaggccguuaggccgaangaagaca

SEQ ID NO: 1321 - RNA, 38 nt, Artificial Sequence
  Description of Artificial Sequence:  Nucleic Acid
  misc_feature (31)..(31): n stands for inosine
ugaauccacugaugaggccguuaggccgaanauggaag

SEQ ID NO: 1322 - RNA, 38 nt, Artificial Sequence
  Description of Artificial Sequence:  Nucleic Acid
  misc_feature (31)..(31): n stands for inosine
agcuguaacugaugaggccguuaggccgaanaauccau

SEQ ID NO: 1323 - RNA, 38 nt, Artificial Sequence
  Description of Artificial Sequence:  Nucleic Acid
  misc_feature (31)..(31): n stands for inosine
gauuaagccugaugaggccguuaggccgaanuaaugaa

SEQ ID NO: 1324 - RNA, 38 nt, Artificial Sequence
  Description of Artificial Sequence:  Nucleic Acid
  misc_feature (31)..(31): n stands for inosine
uuugauuacugaugaggccguuaggccgaancuguaau

SEQ ID NO: 1325 - RNA, 38 nt, Artificial Sequence
  Description of Artificial Sequence:  Nucleic Acid
  misc_feature (31)..(31): n stands for inosine
cguuauuucugaugaggccguuaggccgaanauuaagc

SEQ ID NO: 1326 - RNA, 38 nt, Artificial Sequence
  Description of Artificial Sequence:  Nucleic Acid
  misc_feature (31)..(31): n stands for inosine
guaucuggcugaugaggccguuaggccgaancguuauu

SEQ ID NO: 1327 - RNA, 38 nt, Artificial Sequence
  Description of Artificial Sequence:  Nucleic Acid
  misc_feature (31)..(31): n stands for inosine
gguaucugcugaugaggccguuaggccgaangcguuau

SEQ ID NO: 1328 - RNA, 38 nt, Artificial Sequence
  Description of Artificial Sequence:  Nucleic Acid
  misc_feature (31)..(31): n stands for inosine
ugguaucucugaugaggccguuaggccgaanggcguua

SEQ ID NO: 1329 - RNA, 38 nt, Artificial Sequence
  Description of Artificial Sequence:  Nucleic Acid
  misc_feature (31)..(31): n stands for inosine
cugguauccugaugaggccguuaggccgaangggcguu

SEQ ID NO: 1330 - RNA, 38 nt, Artificial Sequence
  Description of Artificial Sequence:  Nucleic Acid
  misc_feature (31)..(31): n stands for inosine
caggggcucugaugaggccguuaggccgaanuaucugg

SEQ ID NO: 1331 - RNA, 38 nt, Artificial Sequence
  Description of Artificial Sequence:  Nucleic Acid
  misc_feature (31)..(31): n stands for inosine
acaggggccugaugaggccguuaggccgaanguaucug

SEQ ID NO: 1332 - RNA, 38 nt, Artificial Sequence
  Description of Artificial Sequence:  Nucleic Acid
  misc_feature (31)..(31): n stands for inosine
cauacaggcugaugaggccguuaggccgaancugguau

SEQ ID NO: 1333 - RNA, 38 nt, Artificial Sequence
  Description of Artificial Sequence:  Nucleic Acid
  misc_feature (31)..(31): n stands for inosine
ccauacagcugaugaggccguuaggccgaangcuggua

SEQ ID NO: 1334 - RNA, 38 nt, Artificial Sequence
  Description of Artificial Sequence:  Nucleic Acid
  misc_feature (31)..(31): n stands for inosine
gccauacacugaugaggccguuaggccgaanggcuggu

SEQ ID NO: 1335 - RNA, 38 nt, Artificial Sequence
  Description of Artificial Sequence:  Nucleic Acid
  misc_feature (31)..(31): n stands for inosine
ugccauaccugaugaggccguuaggccgaangggcugg

SEQ ID NO: 1336 - RNA, 38 nt, Artificial Sequence
  Description of Artificial Sequence:  Nucleic Acid
  misc_feature (31)..(31): n stands for inosine
aaugccagcugaugaggccguuaggccgaanccauaca

SEQ ID NO: 1337 - RNA, 38 nt, Artificial Sequence
  Description of Artificial Sequence:  Nucleic Acid
  misc_feature (31)..(31): n stands for inosine
acaaugcccugaugaggccguuaggccgaanugccaua

SEQ ID NO: 1338 - RNA, 38 nt, Artificial Sequence
  Description of Artificial Sequence:  Nucleic Acid
  misc_feature (31)..(31): n stands for inosine
agggacaacugaugaggccguuaggccgaanccagugc

SEQ ID NO: 1339 - RNA, 38 nt, Artificial Sequence
  Description of Artificial Sequence:  Nucleic Acid
  misc_feature (31)..(31): n stands for inosine
aggcacagcugaugaggccguuaggccgaanacaaugc

SEQ ID NO: 1340 - RNA, 38 nt, Artificial Sequence
  Description of Artificial Sequence:  Nucleic Acid
  misc_feature (31)..(31): n stands for inosine
uaggcacacugaugaggccguuaggccgaangacaaug

SEQ ID NO: 1341 - RNA, 38 nt, Artificial Sequence
  Description of Artificial Sequence:  Nucleic Acid
  misc_feature (31)..(31): n stands for inosine
uuaggcaccugaugaggccguuaggccgaanggacaau

SEQ ID NO: 1342 - RNA, 38 nt, Artificial Sequence
  Description of Artificial Sequence:  Nucleic Acid
  misc_feature (31)..(31): n stands for inosine
ugguguuacugaugaggccguuaggccgaancacaggg

SEQ ID NO: 1343 - RNA, 38 nt, Artificial Sequence
  Description of Artificial Sequence:  Nucleic Acid
  misc_feature (31)..(31): n stands for inosine
cugguguucugaugaggccguuaggccgaangcacagg

SEQ ID NO: 1344 - RNA, 38 nt, Artificial Sequence
  Description of Artificial Sequence:  Nucleic Acid
  misc_feature (31)..(31): n stands for inosine
aacgcuggcugaugaggccguuaggccgaanuuaggca

SEQ ID NO: 1345 - RNA, 38 nt, Artificial Sequence
  Description of Artificial Sequence:  Nucleic Acid
  misc_feature (31)..(31): n stands for inosine
caaacgcucugaugaggccguuaggccgaanuguuagg

SEQ ID NO: 1346 - RNA, 38 nt, Artificial Sequence
  Description of Artificial Sequence:  Nucleic Acid
  misc_feature (31)..(31): n stands for inosine
ucaaacgccugaugaggccguuaggccgaanguguuag

SEQ ID NO: 1347 - RNA, 38 nt, Artificial Sequence
  Description of Artificial Sequence:  Nucleic Acid
  misc_feature (31)..(31): n stands for inosine
aggaaggccugaugaggccguuaggccgaanccccuca

SEQ ID NO: 1348 - RNA, 38 nt, Artificial Sequence
  Description of Artificial Sequence:  Nucleic Acid
  misc_feature (31)..(31): n stands for inosine
ggcaggaacugaugaggccguuaggccgaancagcccc

SEQ ID NO: 1349 - RNA, 38 nt, Artificial Sequence
  Description of Artificial Sequence:  Nucleic Acid
  misc_feature (31)..(31): n stands for inosine
gggcaggacugaugaggccguuaggccgaangcagccc

SEQ ID NO: 1350 - RNA, 38 nt, Artificial Sequence
  Description of Artificial Sequence:  Nucleic Acid
  misc_feature (31)..(31): n stands for inosine
guagggcacugaugaggccguuaggccgaanaaggcag

SEQ ID NO: 1351 - RNA, 38 nt, Artificial Sequence
  Description of Artificial Sequence:  Nucleic Acid
  misc_feature (31)..(31): n stands for inosine
uguagggccugaugaggccguuaggccgaangaaggca

SEQ ID NO: 1352 - RNA, 38 nt, Artificial Sequence
  Description of Artificial Sequence:  Nucleic Acid
  misc_feature (31)..(31): n stands for inosine
cucuguagcugaugaggccguuaggccgaancaggaag

SEQ ID NO: 1353 - RNA, 38 nt, Artificial Sequence
  Description of Artificial Sequence:  Nucleic Acid
  misc_feature (31)..(31): n stands for inosine
ccucuguacugaugaggccguuaggccgaangcaggaa

SEQ ID NO: 1354 - RNA, 38 nt, Artificial Sequence
  Description of Artificial Sequence:  Nucleic Acid
  misc_feature (31)..(31): n stands for inosine
accucugucugaugaggccguuaggccgaanggcagga

SEQ ID NO: 1355 - RNA, 38 nt, Artificial Sequence
  Description of Artificial Sequence:  Nucleic Acid
  misc_feature (31)..(31): n stands for inosine
gagaccuccugaugaggccguuaggccgaanuagggca

SEQ ID NO: 1356 - RNA, 38 nt, Artificial Sequence
  Description of Artificial Sequence:  Nucleic Acid
  misc_feature (31)..(31): n stands for inosine
gccggcagcugaugaggccguuaggccgaanaccucug

SEQ ID NO: 1357 - RNA, 38 nt, Artificial Sequence
  Description of Artificial Sequence:  Nucleic Acid
  misc_feature (31)..(31): n stands for inosine
gagccggccugaugaggccguuaggccgaanagaccuc

SEQ ID NO: 1358 - RNA, 38 nt, Artificial Sequence
  Description of Artificial Sequence:  Nucleic Acid
  misc_feature (31)..(31): n stands for inosine
aaagagcccugaugaggccguuaggccgaancagagac

SEQ ID NO: 1359 - RNA, 38 nt, Artificial Sequence
  Description of Artificial Sequence:  Nucleic Acid
  misc_feature (31)..(31): n stands for inosine
aaggaaagcugaugaggccguuaggccgaanccggcag

SEQ ID NO: 1360 - RNA, 38 nt, Artificial Sequence
  Description of Artificial Sequence:  Nucleic Acid
  misc_feature (31)..(31): n stands for inosine
gcaaggaacugaugaggccguuaggccgaanagccggc

SEQ ID NO: 1361 - RNA, 38 nt, Artificial Sequence
  Description of Artificial Sequence:  Nucleic Acid
  misc_feature (31)..(31): n stands for inosine
uugagcaacugaugaggccguuaggccgaanaaagagc

SEQ ID NO: 1362 - RNA, 38 nt, Artificial Sequence
  Description of Artificial Sequence:  Nucleic Acid
  misc_feature (31)..(31): n stands for inosine
guugagcacugaugaggccguuaggccgaangaaagag

SEQ ID NO: 1363 - RNA, 38 nt, Artificial Sequence
  Description of Artificial Sequence:  Nucleic Acid
  misc_feature (31)..(31): n stands for inosine
caugguugcugaugaggccguuaggccgaancaaggaa

SEQ ID NO: 1364 - RNA, 38 nt, Artificial Sequence
  Description of Artificial Sequence:  Nucleic Acid
  misc_feature (31)..(31): n stands for inosine
gccauggucugaugaggccguuaggccgaanagcaagg

SEQ ID NO: 1365 - RNA, 38 nt, Artificial Sequence
  Description of Artificial Sequence:  Nucleic Acid
  misc_feature (31)..(31): n stands for inosine
ucagccaucugaugaggccguuaggccgaanuugagca

SEQ ID NO: 1366 - RNA, 38 nt, Artificial Sequence
  Description of Artificial Sequence:  Nucleic Acid
  misc_feature (31)..(31): n stands for inosine
uucagccacugaugaggccguuaggccgaanguugagc

SEQ ID NO: 1367 - RNA, 38 nt, Artificial Sequence
  Description of Artificial Sequence:  Nucleic Acid
  misc_feature (31)..(31): n stands for inosine
uuuccuuccugaugaggccguuaggccgaanccauggu

SEQ ID NO: 1368 - RNA, 38 nt, Artificial Sequence
  Description of Artificial Sequence:  Nucleic Acid
  misc_feature (31)..(31): n stands for inosine
uguugcaccugaugaggccguuaggccgaanuuuccuu

SEQ ID NO: 1369 - RNA, 38 nt, Artificial Sequence
  Description of Artificial Sequence:  Nucleic Acid
  misc_feature (31)..(31): n stands for inosine
agugcugucugaugaggccguuaggccgaancacuguu

SEQ ID NO: 1370 - RNA, 38 nt, Artificial Sequence
  Description of Artificial Sequence:  Nucleic Acid
  misc_feature (31)..(31): n stands for inosine
gccagugccugaugaggccguuaggccgaanuugcacu

SEQ ID NO: 1371 - RNA, 38 nt, Artificial Sequence
  Description of Artificial Sequence:  Nucleic Acid
  misc_feature (31)..(31): n stands for inosine
agagccagcugaugaggccguuaggccgaancuguugc

SEQ ID NO: 1372 - RNA, 38 nt, Artificial Sequence
  Description of Artificial Sequence:  Nucleic Acid
  misc_feature (31)..(31): n stands for inosine
agagagcccugaugaggccguuaggccgaanugcuguu

SEQ ID NO: 1373 - RNA, 38 nt, Artificial Sequence
  Description of Artificial Sequence:  Nucleic Acid
  misc_feature (31)..(31): n stands for inosine
cuggagagcugaugaggccguuaggccgaanccagugc

SEQ ID NO: 1374 - RNA, 38 nt, Artificial Sequence
  Description of Artificial Sequence:  Nucleic Acid
  misc_feature (31)..(31): n stands for inosine
uccuggagcugaugaggccguuaggccgaanagccagu

SEQ ID NO: 1375 - RNA, 38 nt, Artificial Sequence
  Description of Artificial Sequence:  Nucleic Acid
  misc_feature (31)..(31): n stands for inosine
gauccuggcugaugaggccguuaggccgaanagagcca

SEQ ID NO: 1376 - RNA, 38 nt, Artificial Sequence
  Description of Artificial Sequence:  Nucleic Acid
  misc_feature (31)..(31): n stands for inosine
uggauccucugaugaggccguuaggccgaanagagagc

SEQ ID NO: 1377 - RNA, 38 nt, Artificial Sequence
  Description of Artificial Sequence:  Nucleic Acid
  misc_feature (31)..(31): n stands for inosine
cuggaucccugaugaggccguuaggccgaangagagag

SEQ ID NO: 1378 - RNA, 38 nt, Artificial Sequence
  Description of Artificial Sequence:  Nucleic Acid
  misc_feature (31)..(31): n stands for inosine
ccccuucucugaugaggccguuaggccgaanauccugg

SEQ ID NO: 1379 - RNA, 38 nt, Artificial Sequence
  Description of Artificial Sequence:  Nucleic Acid
  misc_feature (31)..(31): n stands for inosine
accccuuccugaugaggccguuaggccgaangauccug

SEQ ID NO: 1380 - RNA, 38 nt, Artificial Sequence
  Description of Artificial Sequence:  Nucleic Acid
  misc_feature (31)..(31): n stands for inosine
ggaagucccugaugaggccguuaggccgaanaccaaac

SEQ ID NO: 1381 - RNA, 38 nt, Artificial Sequence
  Description of Artificial Sequence:  Nucleic Acid
  misc_feature (31)..(31): n stands for inosine
agcaaggacugaugaggccguuaggccgaanuccagac

SEQ ID NO: 1382 - RNA, 38 nt, Artificial Sequence
  Description of Artificial Sequence:  Nucleic Acid
  misc_feature (31)..(31): n stands for inosine
gagagcaacugaugaggccguuaggccgaanaagucca

SEQ ID NO: 1383 - RNA, 38 nt, Artificial Sequence
  Description of Artificial Sequence:  Nucleic Acid
  misc_feature (31)..(31): n stands for inosine
ggagagcacugaugaggccguuaggccgaangaagucc

SEQ ID NO: 1384 - RNA, 38 nt, Artificial Sequence
  Description of Artificial Sequence:  Nucleic Acid
  misc_feature (31)..(31): n stands for inosine
gaggggagcugaugaggccguuaggccgaancaaggaa

SEQ ID NO: 1385 - RNA, 38 nt, Artificial Sequence
  Description of Artificial Sequence:  Nucleic Acid
  misc_feature (31)..(31): n stands for inosine
aagaggggcugaugaggccguuaggccgaanagcaagg

SEQ ID NO: 1386 - RNA, 38 nt, Artificial Sequence
  Description of Artificial Sequence:  Nucleic Acid
  misc_feature (31)..(31): n stands for inosine
agaagaggcugaugaggccguuaggccgaanagagcaa

SEQ ID NO: 1387 - RNA, 38 nt, Artificial Sequence
  Description of Artificial Sequence:  Nucleic Acid
  misc_feature (31)..(31): n stands for inosine
gagaagagcugaugaggccguuaggccgaangagagca

SEQ ID NO: 1388 - RNA, 38 nt, Artificial Sequence
  Description of Artificial Sequence:  Nucleic Acid
  misc_feature (31)..(31): n stands for inosine
ugagaagacugaugaggccguuaggccgaanggagagc

SEQ ID NO: 1389 - RNA, 38 nt, Artificial Sequence
  Description of Artificial Sequence:  Nucleic Acid
  misc_feature (31)..(31): n stands for inosine
uugagaagcugaugaggccguuaggccgaangggagag

SEQ ID NO: 1390 - RNA, 38 nt, Artificial Sequence
  Description of Artificial Sequence:  Nucleic Acid
  misc_feature (31)..(31): n stands for inosine
acuugagacugaugaggccguuaggccgaanaggggag

SEQ ID NO: 1391 - RNA, 38 nt, Artificial Sequence
  Description of Artificial Sequence:  Nucleic Acid
  misc_feature (31)..(31): n stands for inosine
ggcacuugcugaugaggccguuaggccgaanaagaggg

SEQ ID NO: 1392 - RNA, 38 nt, Artificial Sequence
  Description of Artificial Sequence:  Nucleic Acid
  misc_feature (31)..(31): n stands for inosine
aaggcacucugaugaggccguuaggccgaanagaagag

SEQ ID NO: 1393 - RNA, 38 nt, Artificial Sequence
  Description of Artificial Sequence:  Nucleic Acid
  misc_feature (31)..(31): n stands for inosine
acuauuaacugaugaggccguuaggccgaancacuuga

SEQ ID NO: 1394 - RNA, 38 nt, Artificial Sequence
  Description of Artificial Sequence:  Nucleic Acid
  misc_feature (31)..(31): n stands for inosine
uacuauuacugaugaggccguuaggccgaangcacuug

SEQ ID NO: 1395 - RNA, 38 nt, Artificial Sequence
  Description of Artificial Sequence:  Nucleic Acid
  misc_feature (31)..(31): n stands for inosine
ugccagcccugaugaggccguuaggccgaancucuccc

SEQ ID NO: 1396 - RNA, 38 nt, Artificial Sequence
  Description of Artificial Sequence:  Nucleic Acid
  misc_feature (31)..(31): n stands for inosine
gagcugcccugaugaggccguuaggccgaanccugcuc

SEQ ID NO: 1397 - RNA, 38 nt, Artificial Sequence
  Description of Artificial Sequence:  Nucleic Acid
  misc_feature (31)..(31): n stands for inosine
uggagagccugaugaggccguuaggccgaanccagccu

SEQ ID NO: 1398 - RNA, 38 nt, Artificial Sequence
  Description of Artificial Sequence:  Nucleic Acid
  misc_feature (31)..(31): n stands for inosine
gacuggagcugaugaggccguuaggccgaancugccag

SEQ ID NO: 1399 - RNA, 38 nt, Artificial Sequence
  Description of Artificial Sequence:  Nucleic Acid
  misc_feature (31)..(31): n stands for inosine
cugacuggcugaugaggccguuaggccgaanagcugcc

SEQ ID NO: 1400 - RNA, 38 nt, Artificial Sequence
  Description of Artificial Sequence:  Nucleic Acid
  misc_feature (31)..(31): n stands for inosine
uccugacucugaugaggccguuaggccgaanagagcug

SEQ ID NO: 1401 - RNA, 38 nt, Artificial Sequence
  Description of Artificial Sequence:  Nucleic Acid
  misc_feature (31)..(31): n stands for inosine
cuccugaccugaugaggccguuaggccgaangagagcu

SEQ ID NO: 1402 - RNA, 38 nt, Artificial Sequence
  Description of Artificial Sequence:  Nucleic Acid
  misc_feature (31)..(31): n stands for inosine
augccucccugaugaggccguuaggccgaanacuggag

SEQ ID NO: 1403 - RNA, 38 nt, Artificial Sequence
  Description of Artificial Sequence:  Nucleic Acid
  misc_feature (31)..(31): n stands for inosine
aaaaacuacugaugaggccguuaggccgaanccuccug

SEQ ID NO: 1404 - RNA, 38 nt, Artificial Sequence
  Description of Artificial Sequence:  Nucleic Acid
  misc_feature (31)..(31): n stands for inosine
gcuuugaucugaugaggccguuaggccgaanuucacua

SEQ ID NO: 1405 - RNA, 38 nt, Artificial Sequence
  Description of Artificial Sequence:  Nucleic Acid
  misc_feature (31)..(31): n stands for inosine
aagugcuucugaugaggccguuaggccgaanauuguuc

SEQ ID NO: 1406 - RNA, 38 nt, Artificial Sequence
  Description of Artificial Sequence:  Nucleic Acid
  misc_feature (31)..(31): n stands for inosine
aguccaagcugaugaggccguuaggccgaancuuugau

SEQ ID NO: 1407 - RNA, 38 nt, Artificial Sequence
  Description of Artificial Sequence:  Nucleic Acid
  misc_feature (31)..(31): n stands for inosine
agaguccacugaugaggccguuaggccgaanugcuuug

SEQ ID NO: 1408 - RNA, 38 nt, Artificial Sequence
  Description of Artificial Sequence:  Nucleic Acid
  misc_feature (31)..(31): n stands for inosine
agagcaagcugaugaggccguuaggccgaanuccaagu

SEQ ID NO: 1409 - RNA, 38 nt, Artificial Sequence
  Description of Artificial Sequence:  Nucleic Acid
  misc_feature (31)..(31): n stands for inosine
aaagagcacugaugaggccguuaggccgaanaguccaa

SEQ ID NO: 1410 - RNA, 38 nt, Artificial Sequence
  Description of Artificial Sequence:  Nucleic Acid
  misc_feature (31)..(31): n stands for inosine
guagaaagcugaugaggccguuaggccgaancaagagu

SEQ ID NO: 1411 - RNA, 38 nt, Artificial Sequence
  Description of Artificial Sequence:  Nucleic Acid
  misc_feature (31)..(31): n stands for inosine
gaguagaacugaugaggccguuaggccgaanagcaaga

SEQ ID NO: 1412 - RNA, 38 nt, Artificial Sequence
  Description of Artificial Sequence:  Nucleic Acid
  misc_feature (31)..(31): n stands for inosine
uucagagucugaugaggccguuaggccgaanaaagagc

SEQ ID NO: 1413 - RNA, 38 nt, Artificial Sequence
  Description of Artificial Sequence:  Nucleic Acid
  misc_feature (31)..(31): n stands for inosine
uaguucagcugaugaggccguuaggccgaanuagaaag

SEQ ID NO: 1414 - RNA, 38 nt, Artificial Sequence
  Description of Artificial Sequence:  Nucleic Acid
  misc_feature (31)..(31): n stands for inosine
auuaguuccugaugaggccguuaggccgaanaguagaa

SEQ ID NO: 1415 - RNA, 38 nt, Artificial Sequence
  Description of Artificial Sequence:  Nucleic Acid
  misc_feature (31)..(31): n stands for inosine
gcuuuauucugaugaggccguuaggccgaanuucagag

SEQ ID NO: 1416 - RNA, 38 nt, Artificial Sequence
  Description of Artificial Sequence:  Nucleic Acid
  misc_feature (31)..(31): n stands for inosine
uuggcaaccugaugaggccguuaggccgaancuuuauu

SEQ ID NO: 1417 - RNA, 38 nt, Artificial Sequence
  Description of Artificial Sequence:  Nucleic Acid
  misc_feature (31)..(31): n stands for inosine
uccagcuucugaugaggccguuaggccgaancaacagc

SEQ ID NO: 1418 - RNA, 38 nt, Artificial Sequence
  Description of Artificial Sequence:  Nucleic Acid
  misc_feature (31)..(31): n stands for inosine
guccagcucugaugaggccguuaggccgaangcaacag

SEQ ID NO: 1419 - RNA, 38 nt, Artificial Sequence
  Description of Artificial Sequence:  Nucleic Acid
  misc_feature (31)..(31): n stands for inosine
ugccgucccugaugaggccguuaggccgaancuuggca

SEQ ID NO: 1420 - RNA, 38 nt, Artificial Sequence
  Description of Artificial Sequence:  Nucleic Acid
  misc_feature (31)..(31): n stands for inosine
cgagcucgcugaugaggccguuaggccgaanccgucca

SEQ ID NO: 1421 - RNA, 17 nt, Artificial Sequence
  Description of Artificial Sequence:  Nucleic Acid
ggcacgaggcggggccg

SEQ ID NO: 1422 - RNA, 17 nt, Artificial Sequence
  Description of Artificial Sequence:  Nucleic Acid
gaggcggggccgggucg

SEQ ID NO: 1423 - RNA, 17 nt, Artificial Sequence
  Description of Artificial Sequence:  Nucleic Acid
ggggccgggucgcagcu

SEQ ID NO: 1424 - RNA, 17 nt, Artificial Sequence
  Description of Artificial Sequence:  Nucleic Acid
gccgggucgcagcuggg

SEQ ID NO: 1425 - RNA, 17 nt, Artificial Sequence
  Description of Artificial Sequence:  Nucleic Acid
gggucgcagcugggccc

SEQ ID NO: 1426 - RNA, 17 nt, Artificial Sequence
  Description of Artificial Sequence:  Nucleic Acid
gcagcugggcccgcggc

SEQ ID NO: 1427 - RNA, 17 nt, Artificial Sequence
  Description of Artificial Sequence:  Nucleic Acid
cugggcccgcggcaugg

SEQ ID NO: 1428 - RNA, 17 nt, Artificial Sequence
  Description of Artificial Sequence:  Nucleic Acid
ggcccgcggcauggacg

SEQ ID NO: 1429 - RNA, 17 nt, Artificial Sequence
  Description of Artificial Sequence:  Nucleic Acid
gacgaacuguucccccu

SEQ ID NO: 1430 - RNA, 17 nt, Artificial Sequence
  Description of Artificial Sequence:  Nucleic Acid
ucuucccggcagagcag

SEQ ID NO: 1431 - RNA, 17 nt, Artificial Sequence
  Description of Artificial Sequence:  Nucleic Acid
ccggcagagcagcccaa

SEQ ID NO: 1432 - RNA, 17 nt, Artificial Sequence
  Description of Artificial Sequence:  Nucleic Acid
gcagagcagcccaagca

SEQ ID NO: 1433 - RNA, 17 nt, Artificial Sequence
  Description of Artificial Sequence:  Nucleic Acid
cagcccaagcagcgggg

SEQ ID NO: 1434 - RNA, 17 nt, Artificial Sequence
  Description of Artificial Sequence:  Nucleic Acid
cccaagcagcggggcau

SEQ ID NO: 1435 - RNA, 17 nt, Artificial Sequence
  Description of Artificial Sequence:  Nucleic Acid
gcagcggggcaugcgcu

SEQ ID NO: 1436 - RNA, 17 nt, Artificial Sequence
  Description of Artificial Sequence:  Nucleic Acid
cggggcaugcgcuuccg

SEQ ID NO: 1437 - RNA, 17 nt, Artificial Sequence
  Description of Artificial Sequence:  Nucleic Acid
gggcaugcgcuuccgcu

SEQ ID NO: 1438 - RNA, 17 nt, Artificial Sequence
  Description of Artificial Sequence:  Nucleic Acid
gcgcuuccgcuacaagu

SEQ ID NO: 1439 - RNA, 17 nt, Artificial Sequence
  Description of Artificial Sequence:  Nucleic Acid
cgcuacaagugcgaggg

SEQ ID NO: 1440 - RNA, 17 nt, Artificial Sequence
  Description of Artificial Sequence:  Nucleic Acid
cuacaagugcgaggggc

SEQ ID NO: 1441 - RNA, 17 nt, Artificial Sequence
  Description of Artificial Sequence:  Nucleic Acid
ugcgaggggcgcuccgc

SEQ ID NO: 1442 - RNA, 17 nt, Artificial Sequence
  Description of Artificial Sequence:  Nucleic Acid
cgaggggcgcuccgcgg

SEQ ID NO: 1443 - RNA, 17 nt, Artificial Sequence
  Description of Artificial Sequence:  Nucleic Acid
ggcgcuccgcgggcagc

SEQ ID NO: 1444 - RNA, 17 nt, Artificial Sequence
  Description of Artificial Sequence:  Nucleic Acid
cuccgcgggcagcaucc

SEQ ID NO: 1445 - RNA, 17 nt, Artificial Sequence
  Description of Artificial Sequence:  Nucleic Acid
cgcgggcagcaucccag

SEQ ID NO: 1446 - RNA, 17 nt, Artificial Sequence
  Description of Artificial Sequence:  Nucleic Acid
caucccaggcgagagga

SEQ ID NO: 1447 - RNA, 17 nt, Artificial Sequence
  Description of Artificial Sequence:  Nucleic Acid
cgagaggagcacagaua

SEQ ID NO: 1448 - RNA, 17 nt, Artificial Sequence
  Description of Artificial Sequence:  Nucleic Acid
gaucaauggcuacacag

SEQ ID NO: 1449 - RNA, 17 nt, Artificial Sequence
  Description of Artificial Sequence:  Nucleic Acid
cagggacagugcgcauc

SEQ ID NO: 1450 - RNA, 17 nt, Artificial Sequence
  Description of Artificial Sequence:  Nucleic Acid
gggacagugcgcaucuc

SEQ ID NO: 1451 - RNA, 17 nt, Artificial Sequence
  Description of Artificial Sequence:  Nucleic Acid
gacagugcgcaucuccc

SEQ ID NO: 1452 - RNA, 17 nt, Artificial Sequence
  Description of Artificial Sequence:  Nucleic Acid
ucucccuggucaccaag

SEQ ID NO: 1453 - RNA, 17 nt, Artificial Sequence
  Description of Artificial Sequence:  Nucleic Acid
ccucaccggccucaccc

SEQ ID NO: 1454 - RNA, 17 nt, Artificial Sequence
  Description of Artificial Sequence:  Nucleic Acid
ccccacgagcuuguagg

SEQ ID NO: 1455 - RNA, 17 nt, Artificial Sequence
  Description of Artificial Sequence:  Nucleic Acid
acgagcuuguaggaaag

SEQ ID NO: 1456 - RNA, 17 nt, Artificial Sequence
  Description of Artificial Sequence:  Nucleic Acid
aaaggacugccgggaug

SEQ ID NO: 1457 - RNA, 17 nt, Artificial Sequence
  Description of Artificial Sequence:  Nucleic Acid
ccgggauggcuucuaug

SEQ ID NO: 1458 - RNA, 17 nt, Artificial Sequence
  Description of Artificial Sequence:  Nucleic Acid
ucuaugaggcugagcuc

SEQ ID NO: 1459 - RNA, 17 nt, Artificial Sequence
  Description of Artificial Sequence:  Nucleic Acid
gaggcugagcucugccc

SEQ ID NO: 1460 - RNA, 17 nt, Artificial Sequence
  Description of Artificial Sequence:  Nucleic Acid
ugagcucugcccggacc

SEQ ID NO: 1461 - RNA, 17 nt, Artificial Sequence
  Description of Artificial Sequence:  Nucleic Acid
cccggaccgcugcaucc

SEQ ID NO: 1462 - RNA, 17 nt, Artificial Sequence
  Description of Artificial Sequence:  Nucleic Acid
ggaccgcugcauccaca

SEQ ID NO: 1463 - RNA, 17 nt, Artificial Sequence
  Description of Artificial Sequence:  Nucleic Acid
cauccacaguuuccaga

SEQ ID NO: 1464 - RNA, 17 nt, Artificial Sequence
  Description of Artificial Sequence:  Nucleic Acid
ggaauccagugugugaa

SEQ ID NO: 1465 - RNA, 17 nt, Artificial Sequence
  Description of Artificial Sequence:  Nucleic Acid
aauccagugugugaaga

SEQ ID NO: 1466 - RNA, 17 nt, Artificial Sequence
  Description of Artificial Sequence:  Nucleic Acid
uccagugugugaagaag

SEQ ID NO: 1467 - RNA, 17 nt, Artificial Sequence
  Description of Artificial Sequence:  Nucleic Acid
gugaagaagcgggaccu

SEQ ID NO: 1468 - RNA, 17 nt, Artificial Sequence
  Description of Artificial Sequence:  Nucleic Acid
gaccuggagcaggcuau

SEQ ID NO: 1469 - RNA, 17 nt, Artificial Sequence
  Description of Artificial Sequence:  Nucleic Acid
uggagcaggcuaucagu

SEQ ID NO: 1470 - RNA, 17 nt, Artificial Sequence
  Description of Artificial Sequence:  Nucleic Acid
ggcuaucagucagcgca

SEQ ID NO: 1471 - RNA, 17 nt, Artificial Sequence
  Description of Artificial Sequence:  Nucleic Acid
aucagucagcgcaucca

SEQ ID NO: 1472 - RNA, 17 nt, Artificial Sequence
  Description of Artificial Sequence:  Nucleic Acid
cagucagcgcauccaga

SEQ ID NO: 1473 - RNA, 17 nt, Artificial Sequence
  Description of Artificial Sequence:  Nucleic Acid
ccuuccaaguuccuaua

SEQ ID NO: 1474 - RNA, 17 nt, Artificial Sequence
  Description of Artificial Sequence:  Nucleic Acid
auagaagagcagcgugg

SEQ ID NO: 1475 - RNA, 17 nt, Artificial Sequence
  Description of Artificial Sequence:  Nucleic Acid
gaagagcagcgugggga

SEQ ID NO: 1476 - RNA, 17 nt, Artificial Sequence
  Description of Artificial Sequence:  Nucleic Acid
agagcagcguggggacu

SEQ ID NO: 1477 - RNA, 17 nt, Artificial Sequence
  Description of Artificial Sequence:  Nucleic Acid
accugaaugcugugcgg

SEQ ID NO: 1478 - RNA, 17 nt, Artificial Sequence
  Description of Artificial Sequence:  Nucleic Acid
ugaaugcugugcggcuc

SEQ ID NO: 1479 - RNA, 17 nt, Artificial Sequence
  Description of Artificial Sequence:  Nucleic Acid
aaugcugugcggcucug

SEQ ID NO: 1480 - RNA, 17 nt, Artificial Sequence
  Description of Artificial Sequence:  Nucleic Acid
gcugugcggcucugcuu

SEQ ID NO: 1481 - RNA, 17 nt, Artificial Sequence
  Description of Artificial Sequence:  Nucleic Acid
gcggcucugcuuccagg

SEQ ID NO: 1482 - RNA, 17 nt, Artificial Sequence
  Description of Artificial Sequence:  Nucleic Acid
gcuuccaggugacagug

SEQ ID NO: 1483 - RNA, 17 nt, Artificial Sequence
  Description of Artificial Sequence:  Nucleic Acid
aggugacagugcgggac

SEQ ID NO: 1484 - RNA, 17 nt, Artificial Sequence
  Description of Artificial Sequence:  Nucleic Acid
gugacagugcgggaccc

SEQ ID NO: 1485 - RNA, 17 nt, Artificial Sequence
  Description of Artificial Sequence:  Nucleic Acid
cccaucaggcaggcccc

SEQ ID NO: 1486 - RNA, 17 nt, Artificial Sequence
  Description of Artificial Sequence:  Nucleic Acid
ucaggcaggccccuccg

SEQ ID NO: 1487 - RNA, 17 nt, Artificial Sequence
  Description of Artificial Sequence:  Nucleic Acid
gccccuccgccugccgc

SEQ ID NO: 1488 - RNA, 17 nt, Artificial Sequence
  Description of Artificial Sequence:  Nucleic Acid
cuccgccugccgccugu

SEQ ID NO: 1489 - RNA, 17 nt, Artificial Sequence
  Description of Artificial Sequence:  Nucleic Acid
cgccugccgccuguccu

SEQ ID NO: 1490 - RNA, 17 nt, Artificial Sequence
  Description of Artificial Sequence:  Nucleic Acid
ugccgccuguccuuucu

SEQ ID NO: 1491 - RNA, 17 nt, Artificial Sequence
  Description of Artificial Sequence:  Nucleic Acid
ugacaaucgugccccca

SEQ ID NO: 1492 - RNA, 17 nt, Artificial Sequence
  Description of Artificial Sequence:  Nucleic Acid
acaaucgugcccccaac

SEQ ID NO: 1493 - RNA, 17 nt, Artificial Sequence
  Description of Artificial Sequence:  Nucleic Acid
ccaacacugccgagcuc

SEQ ID NO: 1494 - RNA, 17 nt, Artificial Sequence
  Description of Artificial Sequence:  Nucleic Acid
acugccgagcucaagau

SEQ ID NO: 1495 - RNA, 17 nt, Artificial Sequence
  Description of Artificial Sequence:  Nucleic Acid
caagaucugccgaguga

SEQ ID NO: 1496 - RNA, 17 nt, Artificial Sequence
  Description of Artificial Sequence:  Nucleic Acid
ucugccgagugaaccga

SEQ ID NO: 1497 - RNA, 17 nt, Artificial Sequence
  Description of Artificial Sequence:  Nucleic Acid
aaacucuggcagcugcc

SEQ ID NO: 1498 - RNA, 17 nt, Artificial Sequence
  Description of Artificial Sequence:  Nucleic Acid
cucuggcagcugccucg

SEQ ID NO: 1499 - RNA, 17 nt, Artificial Sequence
  Description of Artificial Sequence:  Nucleic Acid
uggcagcugccucggug

SEQ ID NO: 1500 - RNA, 17 nt, Artificial Sequence
  Description of Artificial Sequence:  Nucleic Acid
cugccucgguggggaug

SEQ ID NO: 1501 - RNA, 17 nt, Artificial Sequence
  Description of Artificial Sequence:  Nucleic Acid
uuccuacugugugacaa

SEQ ID NO: 1502 - RNA, 17 nt, Artificial Sequence
  Description of Artificial Sequence:  Nucleic Acid
ccuacugugugacaagg

SEQ ID NO: 1503 - RNA, 17 nt, Artificial Sequence
  Description of Artificial Sequence:  Nucleic Acid
gugacaaggugcagaaa

SEQ ID NO: 1504 - RNA, 17 nt, Artificial Sequence
  Description of Artificial Sequence:  Nucleic Acid
gacaaggugcagaaaga

SEQ ID NO: 1505 - RNA, 17 nt, Artificial Sequence
  Description of Artificial Sequence:  Nucleic Acid
acauugagguguauuuc

SEQ ID NO: 1506 - RNA, 17 nt, Artificial Sequence
  Description of Artificial Sequence:  Nucleic Acid
auugagguguauuucac

SEQ ID NO: 1507 - RNA, 17 nt, Artificial Sequence
  Description of Artificial Sequence:  Nucleic Acid
gggaccaggcugggagg

SEQ ID NO: 1508 - RNA, 17 nt, Artificial Sequence
  Description of Artificial Sequence:  Nucleic Acid
gcugggaggcccgaggc

SEQ ID NO: 1509 - RNA, 17 nt, Artificial Sequence
  Description of Artificial Sequence:  Nucleic Acid
ggcccgaggcuccuuuu

SEQ ID NO: 1510 - RNA, 17 nt, Artificial Sequence
  Description of Artificial Sequence:  Nucleic Acid
uccuuuucgcaagcuga

SEQ ID NO: 1511 - RNA, 17 nt, Artificial Sequence
  Description of Artificial Sequence:  Nucleic Acid
uuucgcaagcugaugug

SEQ ID NO: 1512 - RNA, 17 nt, Artificial Sequence
  Description of Artificial Sequence:  Nucleic Acid
aagcugaugugcaccga

SEQ ID NO: 1513 - RNA, 17 nt, Artificial Sequence
  Description of Artificial Sequence:  Nucleic Acid
gcugaugugcaccgaca

SEQ ID NO: 1514 - RNA, 17 nt, Artificial Sequence
  Description of Artificial Sequence:  Nucleic Acid
accgacaaguggccauu

SEQ ID NO: 1515 - RNA, 17 nt, Artificial Sequence
  Description of Artificial Sequence:  Nucleic Acid
gacaaguggccauugug

SEQ ID NO: 1516 - RNA, 17 nt, Artificial Sequence
  Description of Artificial Sequence:  Nucleic Acid
uggccauuguguuccgg

SEQ ID NO: 1517 - RNA, 17 nt, Artificial Sequence
  Description of Artificial Sequence:  Nucleic Acid
gccauuguguuccggac

SEQ ID NO: 1518 - RNA, 17 nt, Artificial Sequence
  Description of Artificial Sequence:  Nucleic Acid
cucccuacgcagacccc

SEQ ID NO: 1519 - RNA, 17 nt, Artificial Sequence
  Description of Artificial Sequence:  Nucleic Acid
agaccccagccugcagg

SEQ ID NO: 1520 - RNA, 17 nt, Artificial Sequence
  Description of Artificial Sequence:  Nucleic Acid
cccagccugcaggcucc

SEQ ID NO: 1521 - RNA, 17 nt, Artificial Sequence
  Description of Artificial Sequence:  Nucleic Acid
gccugcaggcuccugug

SEQ ID NO: 1522 - RNA, 17 nt, Artificial Sequence
  Description of Artificial Sequence:  Nucleic Acid
aggcuccugugcguguc

SEQ ID NO: 1523 - RNA, 17 nt, Artificial Sequence
  Description of Artificial Sequence:  Nucleic Acid
gcuccugugcgugucuc

SEQ ID NO: 1524 - RNA, 17 nt, Artificial Sequence
  Description of Artificial Sequence:  Nucleic Acid
uccugugcgugucucca

SEQ ID NO: 1525 - RNA, 17 nt, Artificial Sequence
  Description of Artificial Sequence:  Nucleic Acid
cugugcgugucuccaug

SEQ ID NO: 1526 - RNA, 17 nt, Artificial Sequence
  Description of Artificial Sequence:  Nucleic Acid
gucuccaugcagcugcg

SEQ ID NO: 1527 - RNA, 17 nt, Artificial Sequence
  Description of Artificial Sequence:  Nucleic Acid
uccaugcagcugcggcg

SEQ ID NO: 1528 - RNA, 17 nt, Artificial Sequence
  Description of Artificial Sequence:  Nucleic Acid
augcagcugcggcggcc

SEQ ID NO: 1529 - RNA, 17 nt, Artificial Sequence
  Description of Artificial Sequence:  Nucleic Acid
cagcugcggcggccuuc

SEQ ID NO: 1530 - RNA, 17 nt, Artificial Sequence
  Description of Artificial Sequence:  Nucleic Acid
cugcggcggccuuccga

SEQ ID NO: 1531 - RNA, 17 nt, Artificial Sequence
  Description of Artificial Sequence:  Nucleic Acid
gaccgggagcucaguga

SEQ ID NO: 1532 - RNA, 17 nt, Artificial Sequence
  Description of Artificial Sequence:  Nucleic Acid
ggagcucagugagccca

SEQ ID NO: 1533 - RNA, 17 nt, Artificial Sequence
  Description of Artificial Sequence:  Nucleic Acid
cucagugagcccaugga

SEQ ID NO: 1534 - RNA, 17 nt, Artificial Sequence
  Description of Artificial Sequence:  Nucleic Acid
gaauuccaguaccugcc

SEQ ID NO: 1535 - RNA, 17 nt, Artificial Sequence
  Description of Artificial Sequence:  Nucleic Acid
caguaccugccagauac

SEQ ID NO: 1536 - RNA, 17 nt, Artificial Sequence
  Description of Artificial Sequence:  Nucleic Acid
agacgaucgucaccgga

SEQ ID NO: 1537 - RNA, 17 nt, Artificial Sequence
  Description of Artificial Sequence:  Nucleic Acid
ggagaaacguaaaagga

SEQ ID NO: 1538 - RNA, 17 nt, Artificial Sequence
  Description of Artificial Sequence:  Nucleic Acid
cuucaagagcaucauga

SEQ ID NO: 1539 - RNA, 17 nt, Artificial Sequence
  Description of Artificial Sequence:  Nucleic Acid
gaagaagaguccuuuca

SEQ ID NO: 1540 - RNA, 17 nt, Artificial Sequence
  Description of Artificial Sequence:  Nucleic Acid
uccuuucagcggaccca

SEQ ID NO: 1541 - RNA, 17 nt, Artificial Sequence
  Description of Artificial Sequence:  Nucleic Acid
gacccccggccuccacc

SEQ ID NO: 1542 - RNA, 17 nt, Artificial Sequence
  Description of Artificial Sequence:  Nucleic Acid
accucgacgcauugcug

SEQ ID NO: 1543 - RNA, 17 nt, Artificial Sequence
  Description of Artificial Sequence:  Nucleic Acid
gacgcauugcugugccu

SEQ ID NO: 1544 - RNA, 17 nt, Artificial Sequence
  Description of Artificial Sequence:  Nucleic Acid
gcauugcugugccuucc

SEQ ID NO: 1545 - RNA, 17 nt, Artificial Sequence
  Description of Artificial Sequence:  Nucleic Acid
auugcugugccuucccg

SEQ ID NO: 1546 - RNA, 17 nt, Artificial Sequence
  Description of Artificial Sequence:  Nucleic Acid
gccuucccgcagcucag

SEQ ID NO: 1547 - RNA, 17 nt, Artificial Sequence
  Description of Artificial Sequence:  Nucleic Acid
uucccgcagcucagcuu

SEQ ID NO: 1548 - RNA, 17 nt, Artificial Sequence
  Description of Artificial Sequence:  Nucleic Acid
gcagcucagcuucuguc

SEQ ID NO: 1549 - RNA, 17 nt, Artificial Sequence
  Description of Artificial Sequence:  Nucleic Acid
cagcuucuguccccaag

SEQ ID NO: 1550 - RNA, 17 nt, Artificial Sequence
  Description of Artificial Sequence:  Nucleic Acid
guccccaagccagcacc

SEQ ID NO: 1551 - RNA, 17 nt, Artificial Sequence
  Description of Artificial Sequence:  Nucleic Acid
ccaagccagcaccccag

SEQ ID NO: 1552 - RNA, 17 nt, Artificial Sequence
  Description of Artificial Sequence:  Nucleic Acid
gcaccccagcccuaucc

SEQ ID NO: 1553 - RNA, 17 nt, Artificial Sequence
  Description of Artificial Sequence:  Nucleic Acid
cccuuuacgucaucccu

SEQ ID NO: 1554 - RNA, 17 nt, Artificial Sequence
  Description of Artificial Sequence:  Nucleic Acid
aucccugagcaccauca

SEQ ID NO: 1555 - RNA, 17 nt, Artificial Sequence
  Description of Artificial Sequence:  Nucleic Acid
uaugaugaguuucccac

SEQ ID NO: 1556 - RNA, 17 nt, Artificial Sequence
  Description of Artificial Sequence:  Nucleic Acid
ccaccaugguguuuccu

SEQ ID NO: 1557 - RNA, 17 nt, Artificial Sequence
  Description of Artificial Sequence:  Nucleic Acid
accaugguguuuccuuc

SEQ ID NO: 1558 - RNA, 17 nt, Artificial Sequence
  Description of Artificial Sequence:  Nucleic Acid
ccuucugggcagaucag

SEQ ID NO: 1559 - RNA, 17 nt, Artificial Sequence
  Description of Artificial Sequence:  Nucleic Acid
gcagaucagccaggccu

SEQ ID NO: 1560 - RNA, 17 nt, Artificial Sequence
  Description of Artificial Sequence:  Nucleic Acid
ucagccaggccucggcc

SEQ ID NO: 1561 - RNA, 17 nt, Artificial Sequence
  Description of Artificial Sequence:  Nucleic Acid
aggccucggccuuggcc

SEQ ID NO: 1562 - RNA, 17 nt, Artificial Sequence
  Description of Artificial Sequence:  Nucleic Acid
cggccuuggccccggcc

SEQ ID NO: 1563 - RNA, 17 nt, Artificial Sequence
  Description of Artificial Sequence:  Nucleic Acid
uggccccggccccuccc

SEQ ID NO: 1564 - RNA, 17 nt, Artificial Sequence
  Description of Artificial Sequence:  Nucleic Acid
cuccccaaguccugccc

SEQ ID NO: 1565 - RNA, 17 nt, Artificial Sequence
  Description of Artificial Sequence:  Nucleic Acid
caaguccugccccaggc

SEQ ID NO: 1566 - RNA, 17 nt, Artificial Sequence
  Description of Artificial Sequence:  Nucleic Acid
ugccccaggcuccagcc

SEQ ID NO: 1567 - RNA, 17 nt, Artificial Sequence
  Description of Artificial Sequence:  Nucleic Acid
aggcuccagccccugcc

SEQ ID NO: 1568 - RNA, 17 nt, Artificial Sequence
  Description of Artificial Sequence:  Nucleic Acid
cagccccugccccugcu

SEQ ID NO: 1569 - RNA, 17 nt, Artificial Sequence
  Description of Artificial Sequence:  Nucleic Acid
cugccccugcuccagcc

SEQ ID NO: 1570 - RNA, 17 nt, Artificial Sequence
  Description of Artificial Sequence:  Nucleic Acid
cugcuccagccauggua

SEQ ID NO: 1571 - RNA, 17 nt, Artificial Sequence
  Description of Artificial Sequence:  Nucleic Acid
cagccaugguaucagcu

SEQ ID NO: 1572 - RNA, 17 nt, Artificial Sequence
  Description of Artificial Sequence:  Nucleic Acid
ugguaucagcucuggcc

SEQ ID NO: 1573 - RNA, 17 nt, Artificial Sequence
  Description of Artificial Sequence:  Nucleic Acid
cagcucuggcccaggcc

SEQ ID NO: 1574 - RNA, 17 nt, Artificial Sequence
  Description of Artificial Sequence:  Nucleic Acid
uggcccaggccccagcc

SEQ ID NO: 1575 - RNA, 17 nt, Artificial Sequence
  Description of Artificial Sequence:  Nucleic Acid
aggccccagccccuguc

SEQ ID NO: 1576 - RNA, 17 nt, Artificial Sequence
  Description of Artificial Sequence:  Nucleic Acid
cagccccugucccaguc

SEQ ID NO: 1577 - RNA, 17 nt, Artificial Sequence
  Description of Artificial Sequence:  Nucleic Acid
cugucccaguccuagcc

SEQ ID NO: 1578 - RNA, 17 nt, Artificial Sequence
  Description of Artificial Sequence:  Nucleic Acid
caguccuagccccaggc

SEQ ID NO: 1579 - RNA, 17 nt, Artificial Sequence
  Description of Artificial Sequence:  Nucleic Acid
agccccaggcccuccuc

SEQ ID NO: 1580 - RNA, 17 nt, Artificial Sequence
  Description of Artificial Sequence:  Nucleic Acid
cuccucaggcuguggcc

SEQ ID NO: 1581 - RNA, 17 nt, Artificial Sequence
  Description of Artificial Sequence:  Nucleic Acid
cucaggcuguggcccca

SEQ ID NO: 1582 - RNA, 17 nt, Artificial Sequence
  Description of Artificial Sequence:  Nucleic Acid
aggcuguggccccaccu

SEQ ID NO: 1583 - RNA, 17 nt, Artificial Sequence
  Description of Artificial Sequence:  Nucleic Acid
ccccaccugcccccaag

SEQ ID NO: 1584 - RNA, 17 nt, Artificial Sequence
  Description of Artificial Sequence:  Nucleic Acid
gcccccaagcccaccca

SEQ ID NO: 1585 - RNA, 17 nt, Artificial Sequence
  Description of Artificial Sequence:  Nucleic Acid
ccacccaggcuggggaa

SEQ ID NO: 1586 - RNA, 17 nt, Artificial Sequence
  Description of Artificial Sequence:  Nucleic Acid
gaaggaacgcugucaga

SEQ ID NO: 1587 - RNA, 17 nt, Artificial Sequence
  Description of Artificial Sequence:  Nucleic Acid
ggaacgcugucagaggc

SEQ ID NO: 1588 - RNA, 17 nt, Artificial Sequence
  Description of Artificial Sequence:  Nucleic Acid
ugucagaggcccugcug

SEQ ID NO: 1589 - RNA, 17 nt, Artificial Sequence
  Description of Artificial Sequence:  Nucleic Acid
gaggcccugcugcagcu

SEQ ID NO: 1590 - RNA, 17 nt, Artificial Sequence
  Description of Artificial Sequence:  Nucleic Acid
gcccugcugcagcugca

SEQ ID NO: 1591 - RNA, 17 nt, Artificial Sequence
  Description of Artificial Sequence:  Nucleic Acid
cugcugcagcugcaguu

SEQ ID NO: 1592 - RNA, 17 nt, Artificial Sequence
  Description of Artificial Sequence:  Nucleic Acid
cugcagcugcaguuuga

SEQ ID NO: 1593 - RNA, 17 nt, Artificial Sequence
  Description of Artificial Sequence:  Nucleic Acid
cagcugcaguuugauga

SEQ ID NO: 1594 - RNA, 17 nt, Artificial Sequence
  Description of Artificial Sequence:  Nucleic Acid
accugggggccuugcuu

SEQ ID NO: 1595 - RNA, 17 nt, Artificial Sequence
  Description of Artificial Sequence:  Nucleic Acid
ggggccuugcuuggcaa

SEQ ID NO: 1596 - RNA, 17 nt, Artificial Sequence
  Description of Artificial Sequence:  Nucleic Acid
cuugcuuggcaacagca

SEQ ID NO: 1597 - RNA, 17 nt, Artificial Sequence
  Description of Artificial Sequence:  Nucleic Acid
uggcaacagcacagacc

SEQ ID NO: 1598 - RNA, 17 nt, Artificial Sequence
  Description of Artificial Sequence:  Nucleic Acid
cagacccagcuguguuc

SEQ ID NO: 1599 - RNA, 17 nt, Artificial Sequence
  Description of Artificial Sequence:  Nucleic Acid
acccagcuguguucaca

SEQ ID NO: 1600 - RNA, 17 nt, Artificial Sequence
  Description of Artificial Sequence:  Nucleic Acid
ccagcuguguucacaga

SEQ ID NO: 1601 - RNA, 17 nt, Artificial Sequence
  Description of Artificial Sequence:  Nucleic Acid
cagaccuggcauccguc

SEQ ID NO: 1602 - RNA, 17 nt, Artificial Sequence
  Description of Artificial Sequence:  Nucleic Acid
uggcauccgucgacaac

SEQ ID NO: 1603 - RNA, 17 nt, Artificial Sequence
  Description of Artificial Sequence:  Nucleic Acid
aacuccgaguuucagca

SEQ ID NO: 1604 - RNA, 17 nt, Artificial Sequence
  Description of Artificial Sequence:  Nucleic Acid
gaguuucagcagcugcu

SEQ ID NO: 1605 - RNA, 17 nt, Artificial Sequence
  Description of Artificial Sequence:  Nucleic Acid
uuucagcagcugcugaa

SEQ ID NO: 1606 - RNA, 17 nt, Artificial Sequence
  Description of Artificial Sequence:  Nucleic Acid
cagcagcugcugaacca

SEQ ID NO: 1607 - RNA, 17 nt, Artificial Sequence
  Description of Artificial Sequence:  Nucleic Acid
gaaccagggcauaccug

SEQ ID NO: 1608 - RNA, 17 nt, Artificial Sequence
  Description of Artificial Sequence:  Nucleic Acid
gcauaccuguggccccc

SEQ ID NO: 1609 - RNA, 17 nt, Artificial Sequence
  Description of Artificial Sequence:  Nucleic Acid
uaccuguggccccccac

SEQ ID NO: 1610 - RNA, 17 nt, Artificial Sequence
  Description of Artificial Sequence:  Nucleic Acid
acaacugagcccaugcu

SEQ ID NO: 1611 - RNA, 17 nt, Artificial Sequence
  Description of Artificial Sequence:  Nucleic Acid
gagcccaugcugaugga

SEQ ID NO: 1612 - RNA, 17 nt, Artificial Sequence
  Description of Artificial Sequence:  Nucleic Acid
cugauggaguacccuga

SEQ ID NO: 1613 - RNA, 17 nt, Artificial Sequence
  Description of Artificial Sequence:  Nucleic Acid
acccugaggcuauaacu

SEQ ID NO: 1614 - RNA, 17 nt, Artificial Sequence
  Description of Artificial Sequence:  Nucleic Acid
uauaacucgccuaguga

SEQ ID NO: 1615 - RNA, 17 nt, Artificial Sequence
  Description of Artificial Sequence:  Nucleic Acid
cucgccuagugacagcc

SEQ ID NO: 1616 - RNA, 17 nt, Artificial Sequence
  Description of Artificial Sequence:  Nucleic Acid
uagugacagcccagagg

SEQ ID NO: 1617 - RNA, 17 nt, Artificial Sequence
  Description of Artificial Sequence:  Nucleic Acid
gcccagaggccccccga

SEQ ID NO: 1618 - RNA, 17 nt, Artificial Sequence
  Description of Artificial Sequence:  Nucleic Acid
ccgacccagcuccugcu

SEQ ID NO: 1619 - RNA, 17 nt, Artificial Sequence
  Description of Artificial Sequence:  Nucleic Acid
cagcuccugcuccacug

SEQ ID NO: 1620 - RNA, 17 nt, Artificial Sequence
  Description of Artificial Sequence:  Nucleic Acid
cacugggggccccgggg

SEQ ID NO: 1621 - RNA, 17 nt, Artificial Sequence
  Description of Artificial Sequence:  Nucleic Acid
gccccggggcuccccaa

SEQ ID NO: 1622 - RNA, 17 nt, Artificial Sequence
  Description of Artificial Sequence:  Nucleic Acid
ccccaauggccuccuuu

SEQ ID NO: 1623 - RNA, 17 nt, Artificial Sequence
  Description of Artificial Sequence:  Nucleic Acid
ccuccauugcggacaug

SEQ ID NO: 1624 - RNA, 17 nt, Artificial Sequence
  Description of Artificial Sequence:  Nucleic Acid
acuucucagcccugcug

SEQ ID NO: 1625 - RNA, 17 nt, Artificial Sequence
  Description of Artificial Sequence:  Nucleic Acid
ucagcccugcugaguca

SEQ ID NO: 1626 - RNA, 17 nt, Artificial Sequence
  Description of Artificial Sequence:  Nucleic Acid
ccugcugagucagauca

SEQ ID NO: 1627 - RNA, 17 nt, Artificial Sequence
  Description of Artificial Sequence:  Nucleic Acid
ucagaucagcuccuaag

SEQ ID NO: 1628 - RNA, 17 nt, Artificial Sequence
  Description of Artificial Sequence:  Nucleic Acid
cuaagggggugacgccu

SEQ ID NO: 1629 - RNA, 17 nt, Artificial Sequence
  Description of Artificial Sequence:  Nucleic Acid
ggggugacgccugcccu

SEQ ID NO: 1630 - RNA, 17 nt, Artificial Sequence
  Description of Artificial Sequence:  Nucleic Acid
ugacgccugcccucccc

SEQ ID NO: 1631 - RNA, 17 nt, Artificial Sequence
  Description of Artificial Sequence:  Nucleic Acid
uccccagagcacugguu

SEQ ID NO: 1632 - RNA, 17 nt, Artificial Sequence
  Description of Artificial Sequence:  Nucleic Acid
gagcacugguugcaggg

SEQ ID NO: 1633 - RNA, 17 nt, Artificial Sequence
  Description of Artificial Sequence:  Nucleic Acid
cacugguugcaggggau

SEQ ID NO: 1634 - RNA, 17 nt, Artificial Sequence
  Description of Artificial Sequence:  Nucleic Acid
ggauugaagcccuccaa

SEQ ID NO: 1635 - RNA, 17 nt, Artificial Sequence
  Description of Artificial Sequence:  Nucleic Acid
cuccaaaagcacuuacg

SEQ ID NO: 1636 - RNA, 17 nt, Artificial Sequence
  Description of Artificial Sequence:  Nucleic Acid
ggauucugguggggugu

SEQ ID NO: 1637 - RNA, 17 nt, Artificial Sequence
  Description of Artificial Sequence:  Nucleic Acid
cuggugggguguguucc

SEQ ID NO: 1638 - RNA, 17 nt, Artificial Sequence
  Description of Artificial Sequence:  Nucleic Acid
ggugggguguguuccaa

SEQ ID NO: 1639 - RNA, 17 nt, Artificial Sequence
  Description of Artificial Sequence:  Nucleic Acid
ugggguguguuccaacu

SEQ ID NO: 1640 - RNA, 17 nt, Artificial Sequence
  Description of Artificial Sequence:  Nucleic Acid
uuccaacugcccccaac

SEQ ID NO: 1641 - RNA, 17 nt, Artificial Sequence
  Description of Artificial Sequence:  Nucleic Acid
ccaacuuuguggauguc

SEQ ID NO: 1642 - RNA, 17 nt, Artificial Sequence
  Description of Artificial Sequence:  Nucleic Acid
uuguggaugucuuccuu

SEQ ID NO: 1643 - RNA, 17 nt, Artificial Sequence
  Description of Artificial Sequence:  Nucleic Acid
aggggggagccauauuu

SEQ ID NO: 1644 - RNA, 17 nt, Artificial Sequence
  Description of Artificial Sequence:  Nucleic Acid
cuuuuauugucaguauc

SEQ ID NO: 1645 - RNA, 17 nt, Artificial Sequence
  Description of Artificial Sequence:  Nucleic Acid
uauugucaguaucugua

SEQ ID NO: 1646 - RNA, 17 nt, Artificial Sequence
  Description of Artificial Sequence:  Nucleic Acid
caguaucuguaucucuc

SEQ ID NO: 1647 - RNA, 17 nt, Artificial Sequence
  Description of Artificial Sequence:  Nucleic Acid
uuuuggaggugcuuaag

SEQ ID NO: 1648 - RNA, 17 nt, Artificial Sequence
  Description of Artificial Sequence:  Nucleic Acid
uuggaggugcuuaagca

SEQ ID NO: 1649 - RNA, 17 nt, Artificial Sequence
  Description of Artificial Sequence:  Nucleic Acid
gugcuuaagcagaagca

SEQ ID NO: 1650 - RNA, 17 nt, Artificial Sequence
  Description of Artificial Sequence:  Nucleic Acid
aagcagaagcauuaacu

SEQ ID NO: 1651 - RNA, 17 nt, Artificial Sequence
  Description of Artificial Sequence:  Nucleic Acid
aggggggagcuggggaa

SEQ ID NO: 1652 - RNA, 17 nt, Artificial Sequence
  Description of Artificial Sequence:  Nucleic Acid
uuuccccuguccugaug

SEQ ID NO: 1653 - RNA, 17 nt, Artificial Sequence
  Description of Artificial Sequence:  Nucleic Acid
uccugauggucagcucc

SEQ ID NO: 1654 - RNA, 17 nt, Artificial Sequence
  Description of Artificial Sequence:  Nucleic Acid
gauggucagcucccuuc

SEQ ID NO: 1655 - RNA, 17 nt, Artificial Sequence
  Description of Artificial Sequence:  Nucleic Acid
ccuucucuguagggaac

SEQ ID NO: 1656 - RNA, 17 nt, Artificial Sequence
  Description of Artificial Sequence:  Nucleic Acid
agggaacuguggggucc

SEQ ID NO: 1657 - RNA, 17 nt, Artificial Sequence
  Description of Artificial Sequence:  Nucleic Acid
acuguggggucccccau

SEQ ID NO: 1658 - RNA, 17 nt, Artificial Sequence
  Description of Artificial Sequence:  Nucleic Acid
auccuccagcuucuggu

SEQ ID NO: 1659 - RNA, 17 nt, Artificial Sequence
  Description of Artificial Sequence:  Nucleic Acid
agcuucugguacucucc

SEQ ID NO: 1660 - RNA, 17 nt, Artificial Sequence
  Description of Artificial Sequence:  Nucleic Acid
agacagaagcaggcugg

SEQ ID NO: 1661 - RNA, 17 nt, Artificial Sequence
  Description of Artificial Sequence:  Nucleic Acid
agaagcaggcuggaggu

SEQ ID NO: 1662 - RNA, 17 nt, Artificial Sequence
  Description of Artificial Sequence:  Nucleic Acid
ggcuggagguaaggccu

SEQ ID NO: 1663 - RNA, 17 nt, Artificial Sequence
  Description of Artificial Sequence:  Nucleic Acid
gagguaaggccuuugag

SEQ ID NO: 1664 - RNA, 17 nt, Artificial Sequence
  Description of Artificial Sequence:  Nucleic Acid
gccuuugagcccacaaa

SEQ ID NO: 1665 - RNA, 17 nt, Artificial Sequence
  Description of Artificial Sequence:  Nucleic Acid
cccacaaagccuuauca

SEQ ID NO: 1666 - RNA, 17 nt, Artificial Sequence
  Description of Artificial Sequence:  Nucleic Acid
cuuaucaagugucuucc

SEQ ID NO: 1667 - RNA, 17 nt, Artificial Sequence
  Description of Artificial Sequence:  Nucleic Acid
uaucaagugucuuccau

SEQ ID NO: 1668 - RNA, 17 nt, Artificial Sequence
  Description of Artificial Sequence:  Nucleic Acid
ucauuacagcuuaauca

SEQ ID NO: 1669 - RNA, 17 nt, Artificial Sequence
  Description of Artificial Sequence:  Nucleic Acid
aaaauaacgccccagau

SEQ ID NO: 1670 - RNA, 17 nt, Artificial Sequence
  Description of Artificial Sequence:  Nucleic Acid
agauaccagccccugua

SEQ ID NO: 1671 - RNA, 17 nt, Artificial Sequence
  Description of Artificial Sequence:  Nucleic Acid
cagccccuguauggcac

SEQ ID NO: 1672 - RNA, 17 nt, Artificial Sequence
  Description of Artificial Sequence:  Nucleic Acid
ccuguauggcacuggca

SEQ ID NO: 1673 - RNA, 17 nt, Artificial Sequence
  Description of Artificial Sequence:  Nucleic Acid
uggcacuggcauugucc

SEQ ID NO: 1674 - RNA, 17 nt, Artificial Sequence
  Description of Artificial Sequence:  Nucleic Acid
cuggcauugucccugug

SEQ ID NO: 1675 - RNA, 17 nt, Artificial Sequence
  Description of Artificial Sequence:  Nucleic Acid
uugucccugugccuaac

SEQ ID NO: 1676 - RNA, 17 nt, Artificial Sequence
  Description of Artificial Sequence:  Nucleic Acid
gucccugugccuaacac

SEQ ID NO: 1677 - RNA, 17 nt, Artificial Sequence
  Description of Artificial Sequence:  Nucleic Acid
uaacaccagcguuugag

SEQ ID NO: 1678 - RNA, 17 nt, Artificial Sequence
  Description of Artificial Sequence:  Nucleic Acid
acaccagcguuugaggg

SEQ ID NO: 1679 - RNA, 17 nt, Artificial Sequence
  Description of Artificial Sequence:  Nucleic Acid
uuugaggggcugccuuc

SEQ ID NO: 1680 - RNA, 17 nt, Artificial Sequence
  Description of Artificial Sequence:  Nucleic Acid
gaggggcugccuuccug

SEQ ID NO: 1681 - RNA, 17 nt, Artificial Sequence
  Description of Artificial Sequence:  Nucleic Acid
gccuuccugcccuacag

SEQ ID NO: 1682 - RNA, 17 nt, Artificial Sequence
  Description of Artificial Sequence:  Nucleic Acid
cuacagaggucucugcc

SEQ ID NO: 1683 - RNA, 17 nt, Artificial Sequence
  Description of Artificial Sequence:  Nucleic Acid
aggucucugccggcucu

SEQ ID NO: 1684 - RNA, 17 nt, Artificial Sequence
  Description of Artificial Sequence:  Nucleic Acid
cucugccggcucuuucc

SEQ ID NO: 1685 - RNA, 17 nt, Artificial Sequence
  Description of Artificial Sequence:  Nucleic Acid
cuuuccuugcucaacca

SEQ ID NO: 1686 - RNA, 17 nt, Artificial Sequence
  Description of Artificial Sequence:  Nucleic Acid
caaccauggcugaagga

SEQ ID NO: 1687 - RNA, 17 nt, Artificial Sequence
  Description of Artificial Sequence:  Nucleic Acid
aggaaacagugcaacag

SEQ ID NO: 1688 - RNA, 17 nt, Artificial Sequence
  Description of Artificial Sequence:  Nucleic Acid
gaaacagugcaacagca

SEQ ID NO: 1689 - RNA, 17 nt, Artificial Sequence
  Description of Artificial Sequence:  Nucleic Acid
gugcaacagcacuggcu

SEQ ID NO: 1690 - RNA, 17 nt, Artificial Sequence
  Description of Artificial Sequence:  Nucleic Acid
cagcacuggcucucucc

SEQ ID NO: 1691 - RNA, 17 nt, Artificial Sequence
  Description of Artificial Sequence:  Nucleic Acid
cagaagggguuuggucu

SEQ ID NO: 1692 - RNA, 17 nt, Artificial Sequence
  Description of Artificial Sequence:  Nucleic Acid
gggguuuggucuggacu

SEQ ID NO: 1693 - RNA, 17 nt, Artificial Sequence
  Description of Artificial Sequence:  Nucleic Acid
acuuccuugcucucccc

SEQ ID NO: 1694 - RNA, 17 nt, Artificial Sequence
  Description of Artificial Sequence:  Nucleic Acid
cuucucaagugccuuaa

SEQ ID NO: 1695 - RNA, 17 nt, Artificial Sequence
  Description of Artificial Sequence:  Nucleic Acid
ucucaagugccuuaaua

SEQ ID NO: 1696 - RNA, 17 nt, Artificial Sequence
  Description of Artificial Sequence:  Nucleic Acid
ccuuaauaguaggguaa

SEQ ID NO: 1697 - RNA, 17 nt, Artificial Sequence
  Description of Artificial Sequence:  Nucleic Acid
auaguaggguaaguugu

SEQ ID NO: 1698 - RNA, 17 nt, Artificial Sequence
  Description of Artificial Sequence:  Nucleic Acid
uaggguaaguuguuaag

SEQ ID NO: 1699 - RNA, 17 nt, Artificial Sequence
  Description of Artificial Sequence:  Nucleic Acid
gguaaguuguuaagagu

SEQ ID NO: 1700 - RNA, 17 nt, Artificial Sequence
  Description of Artificial Sequence:  Nucleic Acid
uguuaagagugggggag

SEQ ID NO: 1701 - RNA, 17 nt, Artificial Sequence
  Description of Artificial Sequence:  Nucleic Acid
gggggagagcaggcugg

SEQ ID NO: 1702 - RNA, 17 nt, Artificial Sequence
  Description of Artificial Sequence:  Nucleic Acid
gagagcaggcuggcagc

SEQ ID NO: 1703 - RNA, 17 nt, Artificial Sequence
  Description of Artificial Sequence:  Nucleic Acid
gcaggcuggcagcucuc

SEQ ID NO: 1704 - RNA, 17 nt, Artificial Sequence
  Description of Artificial Sequence:  Nucleic Acid
ggcuggcagcucuccag

SEQ ID NO: 1705 - RNA, 17 nt, Artificial Sequence
  Description of Artificial Sequence:  Nucleic Acid
gcucuccagucaggagg

SEQ ID NO: 1706 - RNA, 17 nt, Artificial Sequence
  Description of Artificial Sequence:  Nucleic Acid
gucaggaggcauaguuu

SEQ ID NO: 1707 - RNA, 17 nt, Artificial Sequence
  Description of Artificial Sequence:  Nucleic Acid
gaggcauaguuuuuagu

SEQ ID NO: 1708 - RNA, 17 nt, Artificial Sequence
  Description of Artificial Sequence:  Nucleic Acid
aguuuuuagugaacaau

SEQ ID NO: 1709 - RNA, 17 nt, Artificial Sequence
  Description of Artificial Sequence:  Nucleic Acid
caaucaaagcacuugga

SEQ ID NO: 1710 - RNA, 17 nt, Artificial Sequence
  Description of Artificial Sequence:  Nucleic Acid
ggacucuugcucuuucu

SEQ ID NO: 1711 - RNA, 17 nt, Artificial Sequence
  Description of Artificial Sequence:  Nucleic Acid
cuaauaaagcuguugcc

SEQ ID NO: 1712 - RNA, 17 nt, Artificial Sequence
  Description of Artificial Sequence:  Nucleic Acid
auaaagcuguugccaag

SEQ ID NO: 1713 - RNA, 17 nt, Artificial Sequence
  Description of Artificial Sequence:  Nucleic Acid
aagcuguugccaagcug

SEQ ID NO: 1714 - RNA, 17 nt, Artificial Sequence
  Description of Artificial Sequence:  Nucleic Acid
guugccaagcuggacgg

SEQ ID NO: 1715 - RNA, 17 nt, Artificial Sequence
  Description of Artificial Sequence:  Nucleic Acid
gcuggacggcacgagcu

SEQ ID NO: 1716 - RNA, 17 nt, Artificial Sequence
  Description of Artificial Sequence:  Nucleic Acid
cggcacgagcucgugcc

SEQ ID NO: 1717 - RNA, 37 nt, Artificial Sequence
  Description of Artificial Sequence:  Nucleic Acid
cggccccggccgaaaggcgagugaggucucucgugcc

SEQ ID NO: 1718 - RNA, 37 nt, Artificial Sequence
  Description of Artificial Sequence:  Nucleic Acid
cgacccgggccgaaaggcgagugaggucucccgccuc

SEQ ID NO: 1719 - RNA, 37 nt, Artificial Sequence
  Description of Artificial Sequence:  Nucleic Acid
agcugcgagccgaaaggcgagugaggucuccggcccc

SEQ ID NO: 1720 - RNA, 37 nt, Artificial Sequence
  Description of Artificial Sequence:  Nucleic Acid
cccagcuggccgaaaggcgagugaggucugacccggc

SEQ ID NO: 1721 - RNA, 37 nt, Artificial Sequence
  Description of Artificial Sequence:  Nucleic Acid
gggcccaggccgaaaggcgagugaggucuugcgaccc

SEQ ID NO: 1722 - RNA, 37 nt, Artificial Sequence
  Description of Artificial Sequence:  Nucleic Acid
gccgcggggccgaaaggcgagugaggucuccagcugc

SEQ ID NO: 1723 - RNA, 37 nt, Artificial Sequence
  Description of Artificial Sequence:  Nucleic Acid
ccaugccggccgaaaggcgagugaggucugggcccag

SEQ ID NO: 1724 - RNA, 37 nt, Artificial Sequence
  Description of Artificial Sequence:  Nucleic Acid
cguccauggccgaaaggcgagugaggucucgcgggcc

SEQ ID NO: 1725 - RNA, 37 nt, Artificial Sequence
  Description of Artificial Sequence:  Nucleic Acid
agggggaagccgaaaggcgagugaggucuaguucguc

SEQ ID NO: 1726 - RNA, 37 nt, Artificial Sequence
  Description of Artificial Sequence:  Nucleic Acid
cugcucuggccgaaaggcgagugaggucucgggaaga

SEQ ID NO: 1727 - RNA, 37 nt, Artificial Sequence
  Description of Artificial Sequence:  Nucleic Acid
uugggcuggccgaaaggcgagugaggucuucugccgg

SEQ ID NO: 1728 - RNA, 37 nt, Artificial Sequence
  Description of Artificial Sequence:  Nucleic Acid
ugcuuggggccgaaaggcgagugaggucuugcucugc

SEQ ID NO: 1729 - RNA, 37 nt, Artificial Sequence
  Description of Artificial Sequence:  Nucleic Acid
ccccgcuggccgaaaggcgagugaggucuuugggcug

SEQ ID NO: 1730 - RNA, 37 nt, Artificial Sequence
  Description of Artificial Sequence:  Nucleic Acid
augccccggccgaaaggcgagugaggucuugcuuggg

SEQ ID NO: 1731 - RNA, 37 nt, Artificial Sequence
  Description of Artificial Sequence:  Nucleic Acid
agcgcauggccgaaaggcgagugaggucucccgcugc

SEQ ID NO: 1732 - RNA, 37 nt, Artificial Sequence
  Description of Artificial Sequence:  Nucleic Acid
cggaagcggccgaaaggcgagugaggucuaugccccg

SEQ ID NO: 1733 - RNA, 37 nt, Artificial Sequence
  Description of Artificial Sequence:  Nucleic Acid
agcggaaggccgaaaggcgagugaggucugcaugccc

SEQ ID NO: 1734 - RNA, 37 nt, Artificial Sequence
  Description of Artificial Sequence:  Nucleic Acid
acuuguaggccgaaaggcgagugaggucuggaagcgc

SEQ ID NO: 1735 - RNA, 37 nt, Artificial Sequence
  Description of Artificial Sequence:  Nucleic Acid
cccucgcagccgaaaggcgagugaggucuuuguagcg

SEQ ID NO: 1736 - RNA, 37 nt, Artificial Sequence
  Description of Artificial Sequence:  Nucleic Acid
gccccucggccgaaaggcgagugaggucuacuuguag

SEQ ID NO: 1737 - RNA, 37 nt, Artificial Sequence
  Description of Artificial Sequence:  Nucleic Acid
gcggagcggccgaaaggcgagugaggucucccucgca

SEQ ID NO: 1738 - RNA, 37 nt, Artificial Sequence
  Description of Artificial Sequence:  Nucleic Acid
ccgcggaggccgaaaggcgagugaggucugccccucg

SEQ ID NO: 1739 - RNA, 37 nt, Artificial Sequence
  Description of Artificial Sequence:  Nucleic Acid
gcugcccggccgaaaggcgagugaggucuggagcgcc

SEQ ID NO: 1740 - RNA, 37 nt, Artificial Sequence
  Description of Artificial Sequence:  Nucleic Acid
ggaugcuggccgaaaggcgagugaggucuccgcggag

SEQ ID NO: 1741 - RNA, 37 nt, Artificial Sequence
  Description of Artificial Sequence:  Nucleic Acid
cugggauggccgaaaggcgagugaggucuugcccgcg

SEQ ID NO: 1742 - RNA, 37 nt, Artificial Sequence
  Description of Artificial Sequence:  Nucleic Acid
uccucucggccgaaaggcgagugaggucucugggaug

SEQ ID NO: 1743 - RNA, 37 nt, Artificial Sequence
  Description of Artificial Sequence:  Nucleic Acid
uaucuguggccgaaaggcgagugaggucuuccucucg

SEQ ID NO: 1744 - RNA, 37 nt, Artificial Sequence
  Description of Artificial Sequence:  Nucleic Acid
cuguguaggccgaaaggcgagugaggucucauugauc

SEQ ID NO: 1745 - RNA, 37 nt, Artificial Sequence
  Description of Artificial Sequence:  Nucleic Acid
gaugcgcagccgaaaggcgagugaggucuugucccug

SEQ ID NO: 1746 - RNA, 37 nt, Artificial Sequence
  Description of Artificial Sequence:  Nucleic Acid
gagaugcggccgaaaggcgagugaggucuacuguccc

SEQ ID NO: 1747 - RNA, 37 nt, Artificial Sequence
  Description of Artificial Sequence:  Nucleic Acid
gggagauggccgaaaggcgagugaggucugcacuguc

SEQ ID NO: 1748 - RNA, 37 nt, Artificial Sequence
  Description of Artificial Sequence:  Nucleic Acid
cuuggugagccgaaaggcgagugaggucucagggaga

SEQ ID NO: 1749 - RNA, 37 nt, Artificial Sequence
  Description of Artificial Sequence:  Nucleic Acid
gggugagggccgaaaggcgagugaggucucggugagg

SEQ ID NO: 1750 - RNA, 37 nt, Artificial Sequence
  Description of Artificial Sequence:  Nucleic Acid
ccuacaaggccgaaaggcgagugaggucuucgugggg

SEQ ID NO: 1751 - RNA, 37 nt, Artificial Sequence
  Description of Artificial Sequence:  Nucleic Acid
cuuuccuagccgaaaggcgagugaggucuaagcucgu

SEQ ID NO: 1752 - RNA, 37 nt, Artificial Sequence
  Description of Artificial Sequence:  Nucleic Acid
caucccgggccgaaaggcgagugaggucuaguccuuu

SEQ ID NO: 1753 - RNA, 37 nt, Artificial Sequence
  Description of Artificial Sequence:  Nucleic Acid
cauagaaggccgaaaggcgagugaggucucaucccgg

SEQ ID NO: 1754 - RNA, 37 nt, Artificial Sequence
  Description of Artificial Sequence:  Nucleic Acid
gagcucaggccgaaaggcgagugaggucucucauaga

SEQ ID NO: 1755 - RNA, 37 nt, Artificial Sequence
  Description of Artificial Sequence:  Nucleic Acid
gggcagaggccgaaaggcgagugaggucuucagccuc

SEQ ID NO: 1756 - RNA, 37 nt, Artificial Sequence
  Description of Artificial Sequence:  Nucleic Acid
gguccggggccgaaaggcgagugaggucuagagcuca

SEQ ID NO: 1757 - RNA, 37 nt, Artificial Sequence
  Description of Artificial Sequence:  Nucleic Acid
ggaugcaggccgaaaggcgagugaggucugguccggg

SEQ ID NO: 1758 - RNA, 37 nt, Artificial Sequence
  Description of Artificial Sequence:  Nucleic Acid
uguggauggccgaaaggcgagugaggucuagcggucc

SEQ ID NO: 1759 - RNA, 37 nt, Artificial Sequence
  Description of Artificial Sequence:  Nucleic Acid
ucuggaaagccgaaaggcgagugaggucuuguggaug

SEQ ID NO: 1760 - RNA, 37 nt, Artificial Sequence
  Description of Artificial Sequence:  Nucleic Acid
uucacacagccgaaaggcgagugaggucuuggauucc

SEQ ID NO: 1761 - RNA, 37 nt, Artificial Sequence
  Description of Artificial Sequence:  Nucleic Acid
ucuucacagccgaaaggcgagugaggucuacuggauu

SEQ ID NO: 1762 - RNA, 37 nt, Artificial Sequence
  Description of Artificial Sequence:  Nucleic Acid
cuucuucagccgaaaggcgagugaggucuacacugga

SEQ ID NO: 1763 - RNA, 37 nt, Artificial Sequence
  Description of Artificial Sequence:  Nucleic Acid
aggucccggccgaaaggcgagugaggucuuucuucac

SEQ ID NO: 1764 - RNA, 37 nt, Artificial Sequence
  Description of Artificial Sequence:  Nucleic Acid
auagccuggccgaaaggcgagugaggucuuccagguc

SEQ ID NO: 1765 - RNA, 37 nt, Artificial Sequence
  Description of Artificial Sequence:  Nucleic Acid
acugauaggccgaaaggcgagugaggucucugcucca

SEQ ID NO: 1766 - RNA, 37 nt, Artificial Sequence
  Description of Artificial Sequence:  Nucleic Acid
ugcgcugagccgaaaggcgagugaggucuugauagcc

SEQ ID NO: 1767 - RNA, 37 nt, Artificial Sequence
  Description of Artificial Sequence:  Nucleic Acid
uggaugcggccgaaaggcgagugaggucuugacugau

SEQ ID NO: 1768 - RNA, 37 nt, Artificial Sequence
  Description of Artificial Sequence:  Nucleic Acid
ucuggauggccgaaaggcgagugaggucugcugacug

SEQ ID NO: 1769 - RNA, 37 nt, Artificial Sequence
  Description of Artificial Sequence:  Nucleic Acid
uauaggaagccgaaaggcgagugaggucuuuggaagg

SEQ ID NO: 1770 - RNA, 37 nt, Artificial Sequence
  Description of Artificial Sequence:  Nucleic Acid
ccacgcuggccgaaaggcgagugaggucuucuucuau

SEQ ID NO: 1771 - RNA, 37 nt, Artificial Sequence
  Description of Artificial Sequence:  Nucleic Acid
uccccacggccgaaaggcgagugaggucuugcucuuc

SEQ ID NO: 1772 - RNA, 37 nt, Artificial Sequence
  Description of Artificial Sequence:  Nucleic Acid
aguccccagccgaaaggcgagugaggucugcugcucu

SEQ ID NO: 1773 - RNA, 37 nt, Artificial Sequence
  Description of Artificial Sequence:  Nucleic Acid
ccgcacaggccgaaaggcgagugaggucuauucaggu

SEQ ID NO: 1774 - RNA, 37 nt, Artificial Sequence
  Description of Artificial Sequence:  Nucleic Acid
gagccgcagccgaaaggcgagugaggucuagcauuca

SEQ ID NO: 1775 - RNA, 37 nt, Artificial Sequence
  Description of Artificial Sequence:  Nucleic Acid
cagagccggccgaaaggcgagugaggucuacagcauu

SEQ ID NO: 1776 - RNA, 37 nt, Artificial Sequence
  Description of Artificial Sequence:  Nucleic Acid
aagcagaggccgaaaggcgagugaggucucgcacagc

SEQ ID NO: 1777 - RNA, 37 nt, Artificial Sequence
  Description of Artificial Sequence:  Nucleic Acid
ccuggaaggccgaaaggcgagugaggucuagagccgc

SEQ ID NO: 1778 - RNA, 37 nt, Artificial Sequence
  Description of Artificial Sequence:  Nucleic Acid
cacugucagccgaaaggcgagugaggucucuggaagc

SEQ ID NO: 1779 - RNA, 37 nt, Artificial Sequence
  Description of Artificial Sequence:  Nucleic Acid
gucccgcagccgaaaggcgagugaggucuugucaccu

SEQ ID NO: 1780 - RNA, 37 nt, Artificial Sequence
  Description of Artificial Sequence:  Nucleic Acid
gggucccggccgaaaggcgagugaggucuacugucac

SEQ ID NO: 1781 - RNA, 37 nt, Artificial Sequence
  Description of Artificial Sequence:  Nucleic Acid
ggggccuggccgaaaggcgagugaggucucugauggg

SEQ ID NO: 1782 - RNA, 37 nt, Artificial Sequence
  Description of Artificial Sequence:  Nucleic Acid
cggagggggccgaaaggcgagugaggucucugccuga

SEQ ID NO: 1783 - RNA, 37 nt, Artificial Sequence
  Description of Artificial Sequence:  Nucleic Acid
gcggcagggccgaaaggcgagugaggucuggaggggc

SEQ ID NO: 1784 - RNA, 37 nt, Artificial Sequence
  Description of Artificial Sequence:  Nucleic Acid
acaggcgggccgaaaggcgagugaggucuaggcggag

SEQ ID NO: 1785 - RNA, 37 nt, Artificial Sequence
  Description of Artificial Sequence:  Nucleic Acid
aggacagggccgaaaggcgagugaggucuggcaggcg

SEQ ID NO: 1786 - RNA, 37 nt, Artificial Sequence
  Description of Artificial Sequence:  Nucleic Acid
agaaaggagccgaaaggcgagugaggucuaggcggca

SEQ ID NO: 1787 - RNA, 37 nt, Artificial Sequence
  Description of Artificial Sequence:  Nucleic Acid
ugggggcagccgaaaggcgagugaggucugauuguca

SEQ ID NO: 1788 - RNA, 37 nt, Artificial Sequence
  Description of Artificial Sequence:  Nucleic Acid
guuggggggccgaaaggcgagugaggucuacgauugu

SEQ ID NO: 1789 - RNA, 37 nt, Artificial Sequence
  Description of Artificial Sequence:  Nucleic Acid
gagcucgggccgaaaggcgagugaggucuaguguugg

SEQ ID NO: 1790 - RNA, 37 nt, Artificial Sequence
  Description of Artificial Sequence:  Nucleic Acid
aucuugaggccgaaaggcgagugaggucuucggcagu

SEQ ID NO: 1791 - RNA, 37 nt, Artificial Sequence
  Description of Artificial Sequence:  Nucleic Acid
ucacucgggccgaaaggcgagugaggucuagaucuug

SEQ ID NO: 1792 - RNA, 37 nt, Artificial Sequence
  Description of Artificial Sequence:  Nucleic Acid
ucgguucagccgaaaggcgagugaggucuucggcaga

SEQ ID NO: 1793 - RNA, 37 nt, Artificial Sequence
  Description of Artificial Sequence:  Nucleic Acid
ggcagcuggccgaaaggcgagugaggucucagaguuu

SEQ ID NO: 1794 - RNA, 37 nt, Artificial Sequence
  Description of Artificial Sequence:  Nucleic Acid
cgaggcaggccgaaaggcgagugaggucuugccagag

SEQ ID NO: 1795 - RNA, 37 nt, Artificial Sequence
  Description of Artificial Sequence:  Nucleic Acid
caccgagggccgaaaggcgagugaggucuagcugcca

SEQ ID NO: 1796 - RNA, 37 nt, Artificial Sequence
  Description of Artificial Sequence:  Nucleic Acid
cauccccagccgaaaggcgagugaggucucgaggcag

SEQ ID NO: 1797 - RNA, 37 nt, Artificial Sequence
  Description of Artificial Sequence:  Nucleic Acid
uugucacagccgaaaggcgagugaggucuaguaggaa

SEQ ID NO: 1798 - RNA, 37 nt, Artificial Sequence
  Description of Artificial Sequence:  Nucleic Acid
ccuugucagccgaaaggcgagugaggucuacaguagg

SEQ ID NO: 1799 - RNA, 37 nt, Artificial Sequence
  Description of Artificial Sequence:  Nucleic Acid
uuucugcagccgaaaggcgagugaggucucuugucac

SEQ ID NO: 1800 - RNA, 37 nt, Artificial Sequence
  Description of Artificial Sequence:  Nucleic Acid
ucuuucuggccgaaaggcgagugaggucuaccuuguc

SEQ ID NO: 1801 - RNA, 37 nt, Artificial Sequence
  Description of Artificial Sequence:  Nucleic Acid
gaaauacagccgaaaggcgagugaggucucucaaugu

SEQ ID NO: 1802 - RNA, 37 nt, Artificial Sequence
  Description of Artificial Sequence:  Nucleic Acid
gugaaauagccgaaaggcgagugaggucuaccucaau

SEQ ID NO: 1803 - RNA, 37 nt, Artificial Sequence
  Description of Artificial Sequence:  Nucleic Acid
ccucccaggccgaaaggcgagugaggucucugguccc

SEQ ID NO: 1804 - RNA, 37 nt, Artificial Sequence
  Description of Artificial Sequence:  Nucleic Acid
gccucggggccgaaaggcgagugaggucucucccagc

SEQ ID NO: 1805 - RNA, 37 nt, Artificial Sequence
  Description of Artificial Sequence:  Nucleic Acid
aaaaggaggccgaaaggcgagugaggucucucgggcc

SEQ ID NO: 1806 - RNA, 37 nt, Artificial Sequence
  Description of Artificial Sequence:  Nucleic Acid
ucagcuuggccgaaaggcgagugaggucugaaaagga

SEQ ID NO: 1807 - RNA, 37 nt, Artificial Sequence
  Description of Artificial Sequence:  Nucleic Acid
cacaucaggccgaaaggcgagugaggucuuugcgaaa

SEQ ID NO: 1808 - RNA, 37 nt, Artificial Sequence
  Description of Artificial Sequence:  Nucleic Acid
ucggugcagccgaaaggcgagugaggucuaucagcuu

SEQ ID NO: 1809 - RNA, 37 nt, Artificial Sequence
  Description of Artificial Sequence:  Nucleic Acid
ugucgguggccgaaaggcgagugaggucuacaucagc

SEQ ID NO: 1810 - RNA, 37 nt, Artificial Sequence
  Description of Artificial Sequence:  Nucleic Acid
aauggccagccgaaaggcgagugaggucuuugucggu

SEQ ID NO: 1811 - RNA, 37 nt, Artificial Sequence
  Description of Artificial Sequence:  Nucleic Acid
cacaaugggccgaaaggcgagugaggucucacuuguc

SEQ ID NO: 1812 - RNA, 37 nt, Artificial Sequence
  Description of Artificial Sequence:  Nucleic Acid
ccggaacagccgaaaggcgagugaggucuaauggcca

SEQ ID NO: 1813 - RNA, 37 nt, Artificial Sequence
  Description of Artificial Sequence:  Nucleic Acid
guccggaagccgaaaggcgagugaggucuacaauggc

SEQ ID NO: 1814 - RNA, 37 nt, Artificial Sequence
  Description of Artificial Sequence:  Nucleic Acid
ggggucuggccgaaaggcgagugaggucuguagggag

SEQ ID NO: 1815 - RNA, 37 nt, Artificial Sequence
  Description of Artificial Sequence:  Nucleic Acid
ccugcagggccgaaaggcgagugaggucuuggggucu

SEQ ID NO: 1816 - RNA, 37 nt, Artificial Sequence
  Description of Artificial Sequence:  Nucleic Acid
ggagccuggccgaaaggcgagugaggucuaggcuggg

SEQ ID NO: 1817 - RNA, 37 nt, Artificial Sequence
  Description of Artificial Sequence:  Nucleic Acid
cacaggaggccgaaaggcgagugaggucucugcaggc

SEQ ID NO: 1818 - RNA, 37 nt, Artificial Sequence
  Description of Artificial Sequence:  Nucleic Acid
gacacgcagccgaaaggcgagugaggucuaggagccu

SEQ ID NO: 1819 - RNA, 37 nt, Artificial Sequence
  Description of Artificial Sequence:  Nucleic Acid
gagacacggccgaaaggcgagugaggucuacaggagc

SEQ ID NO: 1820 - RNA, 37 nt, Artificial Sequence
  Description of Artificial Sequence:  Nucleic Acid
uggagacagccgaaaggcgagugaggucugcacagga

SEQ ID NO: 1821 - RNA, 37 nt, Artificial Sequence
  Description of Artificial Sequence:  Nucleic Acid
cauggagagccgaaaggcgagugaggucuacgcacag

SEQ ID NO: 1822 - RNA, 37 nt, Artificial Sequence
  Description of Artificial Sequence:  Nucleic Acid
cgcagcuggccgaaaggcgagugaggucuauggagac

SEQ ID NO: 1823 - RNA, 37 nt, Artificial Sequence
  Description of Artificial Sequence:  Nucleic Acid
cgccgcaggccgaaaggcgagugaggucuugcaugga

SEQ ID NO: 1824 - RNA, 37 nt, Artificial Sequence
  Description of Artificial Sequence:  Nucleic Acid
ggccgccggccgaaaggcgagugaggucuagcugcau

SEQ ID NO: 1825 - RNA, 37 nt, Artificial Sequence
  Description of Artificial Sequence:  Nucleic Acid
gaaggccggccgaaaggcgagugaggucucgcagcug

SEQ ID NO: 1826 - RNA, 37 nt, Artificial Sequence
  Description of Artificial Sequence:  Nucleic Acid
ucggaagggccgaaaggcgagugaggucucgccgcag

SEQ ID NO: 1827 - RNA, 37 nt, Artificial Sequence
  Description of Artificial Sequence:  Nucleic Acid
ucacugaggccgaaaggcgagugaggucuucccgguc

SEQ ID NO: 1828 - RNA, 37 nt, Artificial Sequence
  Description of Artificial Sequence:  Nucleic Acid
ugggcucagccgaaaggcgagugaggucuugagcucc

SEQ ID NO: 1829 - RNA, 37 nt, Artificial Sequence
  Description of Artificial Sequence:  Nucleic Acid
uccauggggccgaaaggcgagugaggucuucacugag

SEQ ID NO: 1830 - RNA, 37 nt, Artificial Sequence
  Description of Artificial Sequence:  Nucleic Acid
ggcagguagccgaaaggcgagugaggucuuggaauuc

SEQ ID NO: 1831 - RNA, 37 nt, Artificial Sequence
  Description of Artificial Sequence:  Nucleic Acid
guaucugggccgaaaggcgagugaggucuagguacug

SEQ ID NO: 1832 - RNA, 37 nt, Artificial Sequence
  Description of Artificial Sequence:  Nucleic Acid
uccggugagccgaaaggcgagugaggucugaucgucu

SEQ ID NO: 1833 - RNA, 37 nt, Artificial Sequence
  Description of Artificial Sequence:  Nucleic Acid
uccuuuuagccgaaaggcgagugaggucuguuucucc

SEQ ID NO: 1834 - RNA, 37 nt, Artificial Sequence
  Description of Artificial Sequence:  Nucleic Acid
ucaugauggccgaaaggcgagugaggucuucuugaag

SEQ ID NO: 1835 - RNA, 37 nt, Artificial Sequence
  Description of Artificial Sequence:  Nucleic Acid
ugaaaggagccgaaaggcgagugaggucuucuucuuc

SEQ ID NO: 1836 - RNA, 37 nt, Artificial Sequence
  Description of Artificial Sequence:  Nucleic Acid
uggguccggccgaaaggcgagugaggucuugaaagga

SEQ ID NO: 1837 - RNA, 37 nt, Artificial Sequence
  Description of Artificial Sequence:  Nucleic Acid
gguggagggccgaaaggcgagugaggucucggggguc

SEQ ID NO: 1838 - RNA, 37 nt, Artificial Sequence
  Description of Artificial Sequence:  Nucleic Acid
cagcaauggccgaaaggcgagugaggucugucgaggu

SEQ ID NO: 1839 - RNA, 37 nt, Artificial Sequence
  Description of Artificial Sequence:  Nucleic Acid
aggcacaggccgaaaggcgagugaggucuaaugcguc

SEQ ID NO: 1840 - RNA, 37 nt, Artificial Sequence
  Description of Artificial Sequence:  Nucleic Acid
ggaaggcagccgaaaggcgagugaggucuagcaaugc

SEQ ID NO: 1841 - RNA, 37 nt, Artificial Sequence
  Description of Artificial Sequence:  Nucleic Acid
cgggaagggccgaaaggcgagugaggucuacagcaau

SEQ ID NO: 1842 - RNA, 37 nt, Artificial Sequence
  Description of Artificial Sequence:  Nucleic Acid
cugagcuggccgaaaggcgagugaggucugggaaggc

SEQ ID NO: 1843 - RNA, 37 nt, Artificial Sequence
  Description of Artificial Sequence:  Nucleic Acid
aagcugaggccgaaaggcgagugaggucuugcgggaa

SEQ ID NO: 1844 - RNA, 37 nt, Artificial Sequence
  Description of Artificial Sequence:  Nucleic Acid
gacagaaggccgaaaggcgagugaggucuugagcugc

SEQ ID NO: 1845 - RNA, 37 nt, Artificial Sequence
  Description of Artificial Sequence:  Nucleic Acid
cuuggggagccgaaaggcgagugaggucuagaagcug

SEQ ID NO: 1846 - RNA, 37 nt, Artificial Sequence
  Description of Artificial Sequence:  Nucleic Acid
ggugcugggccgaaaggcgagugaggucuuuggggac

SEQ ID NO: 1847 - RNA, 37 nt, Artificial Sequence
  Description of Artificial Sequence:  Nucleic Acid
cugggguggccgaaaggcgagugaggucuuggcuugg

SEQ ID NO: 1848 - RNA, 37 nt, Artificial Sequence
  Description of Artificial Sequence:  Nucleic Acid
ggauaggggccgaaaggcgagugaggucuuggggugc

SEQ ID NO: 1849 - RNA, 37 nt, Artificial Sequence
  Description of Artificial Sequence:  Nucleic Acid
agggaugagccgaaaggcgagugaggucuguaaaggg

SEQ ID NO: 1850 - RNA, 37 nt, Artificial Sequence
  Description of Artificial Sequence:  Nucleic Acid
ugaugguggccgaaaggcgagugaggucuucagggau

SEQ ID NO: 1851 - RNA, 37 nt, Artificial Sequence
  Description of Artificial Sequence:  Nucleic Acid
gugggaaagccgaaaggcgagugaggucuucaucaua

SEQ ID NO: 1852 - RNA, 37 nt, Artificial Sequence
  Description of Artificial Sequence:  Nucleic Acid
aggaaacagccgaaaggcgagugaggucucauggugg

SEQ ID NO: 1853 - RNA, 37 nt, Artificial Sequence
  Description of Artificial Sequence:  Nucleic Acid
gaaggaaagccgaaaggcgagugaggucuaccauggu

SEQ ID NO: 1854 - RNA, 37 nt, Artificial Sequence
  Description of Artificial Sequence:  Nucleic Acid
cugaucuggccgaaaggcgagugaggucuccagaagg

SEQ ID NO: 1855 - RNA, 37 nt, Artificial Sequence
  Description of Artificial Sequence:  Nucleic Acid
aggccugggccgaaaggcgagugaggucuugaucugc

SEQ ID NO: 1856 - RNA, 37 nt, Artificial Sequence
  Description of Artificial Sequence:  Nucleic Acid
ggccgagggccgaaaggcgagugaggucucuggcuga

SEQ ID NO: 1857 - RNA, 37 nt, Artificial Sequence
  Description of Artificial Sequence:  Nucleic Acid
ggccaagggccgaaaggcgagugaggucucgaggccu

SEQ ID NO: 1858 - RNA, 37 nt, Artificial Sequence
  Description of Artificial Sequence:  Nucleic Acid
ggccgggggccgaaaggcgagugaggucucaaggccg

SEQ ID NO: 1859 - RNA, 37 nt, Artificial Sequence
  Description of Artificial Sequence:  Nucleic Acid
gggagggggccgaaaggcgagugaggucucggggcca

SEQ ID NO: 1860 - RNA, 37 nt, Artificial Sequence
  Description of Artificial Sequence:  Nucleic Acid
gggcaggagccgaaaggcgagugaggucuuuggggag

SEQ ID NO: 1861 - RNA, 37 nt, Artificial Sequence
  Description of Artificial Sequence:  Nucleic Acid
gccugggggccgaaaggcgagugaggucuaggacuug

SEQ ID NO: 1862 - RNA, 37 nt, Artificial Sequence
  Description of Artificial Sequence:  Nucleic Acid
ggcuggaggccgaaaggcgagugaggucucuggggca

SEQ ID NO: 1863 - RNA, 37 nt, Artificial Sequence
  Description of Artificial Sequence:  Nucleic Acid
ggcagggggccgaaaggcgagugaggucuuggagccu

SEQ ID NO: 1864 - RNA, 37 nt, Artificial Sequence
  Description of Artificial Sequence:  Nucleic Acid
agcagggggccgaaaggcgagugaggucuaggggcug

SEQ ID NO: 1865 - RNA, 37 nt, Artificial Sequence
  Description of Artificial Sequence:  Nucleic Acid
ggcuggaggccgaaaggcgagugaggucuaggggcag

SEQ ID NO: 1866 - RNA, 37 nt, Artificial Sequence
  Description of Artificial Sequence:  Nucleic Acid
uaccaugggccgaaaggcgagugaggucuuggagcag

SEQ ID NO: 1867 - RNA, 37 nt, Artificial Sequence
  Description of Artificial Sequence:  Nucleic Acid
agcugauagccgaaaggcgagugaggucucauggcug

SEQ ID NO: 1868 - RNA, 37 nt, Artificial Sequence
  Description of Artificial Sequence:  Nucleic Acid
ggccagaggccgaaaggcgagugaggucuugauacca

SEQ ID NO: 1869 - RNA, 37 nt, Artificial Sequence
  Description of Artificial Sequence:  Nucleic Acid
ggccuggggccgaaaggcgagugaggucucagagcug

SEQ ID NO: 1870 - RNA, 37 nt, Artificial Sequence
  Description of Artificial Sequence:  Nucleic Acid
ggcugggggccgaaaggcgagugaggucucugggcca

SEQ ID NO: 1871 - RNA, 37 nt, Artificial Sequence
  Description of Artificial Sequence:  Nucleic Acid
gacagggggccgaaaggcgagugaggucuuggggccu

SEQ ID NO: 1872 - RNA, 37 nt, Artificial Sequence
  Description of Artificial Sequence:  Nucleic Acid
gacugggagccgaaaggcgagugaggucuaggggcug

SEQ ID NO: 1873 - RNA, 37 nt, Artificial Sequence
  Description of Artificial Sequence:  Nucleic Acid
ggcuaggagccgaaaggcgagugaggucuugggacag

SEQ ID NO: 1874 - RNA, 37 nt, Artificial Sequence
  Description of Artificial Sequence:  Nucleic Acid
gccugggggccgaaaggcgagugaggucuuaggacug

SEQ ID NO: 1875 - RNA, 37 nt, Artificial Sequence
  Description of Artificial Sequence:  Nucleic Acid
gaggaggggccgaaaggcgagugaggucucuggggcu

SEQ ID NO: 1876 - RNA, 37 nt, Artificial Sequence
  Description of Artificial Sequence:  Nucleic Acid
ggccacaggccgaaaggcgagugaggucucugaggag

SEQ ID NO: 1877 - RNA, 37 nt, Artificial Sequence
  Description of Artificial Sequence:  Nucleic Acid
uggggccagccgaaaggcgagugaggucuagccugag

SEQ ID NO: 1878 - RNA, 37 nt, Artificial Sequence
  Description of Artificial Sequence:  Nucleic Acid
aggugggggccgaaaggcgagugaggucucacagccu

SEQ ID NO: 1879 - RNA, 37 nt, Artificial Sequence
  Description of Artificial Sequence:  Nucleic Acid
cuuggggggccgaaaggcgagugaggucuaggugggg

SEQ ID NO: 1880 - RNA, 37 nt, Artificial Sequence
  Description of Artificial Sequence:  Nucleic Acid
uggguggggccgaaaggcgagugaggucuuugggggc

SEQ ID NO: 1881 - RNA, 37 nt, Artificial Sequence
  Description of Artificial Sequence:  Nucleic Acid
uuccccaggccgaaaggcgagugaggucucugggugg

SEQ ID NO: 1882 - RNA, 37 nt, Artificial Sequence
  Description of Artificial Sequence:  Nucleic Acid
ucugacaggccgaaaggcgagugaggucuguuccuuc

SEQ ID NO: 1883 - RNA, 37 nt, Artificial Sequence
  Description of Artificial Sequence:  Nucleic Acid
gccucugagccgaaaggcgagugaggucuagcguucc

SEQ ID NO: 1884 - RNA, 37 nt, Artificial Sequence
  Description of Artificial Sequence:  Nucleic Acid
cagcaggggccgaaaggcgagugaggucucucugaca

SEQ ID NO: 1885 - RNA, 37 nt, Artificial Sequence
  Description of Artificial Sequence:  Nucleic Acid
agcugcaggccgaaaggcgagugaggucuagggccuc

SEQ ID NO: 1886 - RNA, 37 nt, Artificial Sequence
  Description of Artificial Sequence:  Nucleic Acid
ugcagcuggccgaaaggcgagugaggucuagcagggc

SEQ ID NO: 1887 - RNA, 37 nt, Artificial Sequence
  Description of Artificial Sequence:  Nucleic Acid
aacugcaggccgaaaggcgagugaggucuugcagcag

SEQ ID NO: 1888 - RNA, 37 nt, Artificial Sequence
  Description of Artificial Sequence:  Nucleic Acid
ucaaacuggccgaaaggcgagugaggucuagcugcag

SEQ ID NO: 1889 - RNA, 37 nt, Artificial Sequence
  Description of Artificial Sequence:  Nucleic Acid
ucaucaaagccgaaaggcgagugaggucuugcagcug

SEQ ID NO: 1890 - RNA, 37 nt, Artificial Sequence
  Description of Artificial Sequence:  Nucleic Acid
aagcaagggccgaaaggcgagugaggucuccccaggu

SEQ ID NO: 1891 - RNA, 37 nt, Artificial Sequence
  Description of Artificial Sequence:  Nucleic Acid
uugccaaggccgaaaggcgagugaggucuaaggcccc

SEQ ID NO: 1892 - RNA, 37 nt, Artificial Sequence
  Description of Artificial Sequence:  Nucleic Acid
ugcuguuggccgaaaggcgagugaggucucaagcaag

SEQ ID NO: 1893 - RNA, 37 nt, Artificial Sequence
  Description of Artificial Sequence:  Nucleic Acid
ggucuguggccgaaaggcgagugaggucuuguugcca

SEQ ID NO: 1894 - RNA, 37 nt, Artificial Sequence
  Description of Artificial Sequence:  Nucleic Acid
gaacacaggccgaaaggcgagugaggucuugggucug

SEQ ID NO: 1895 - RNA, 37 nt, Artificial Sequence
  Description of Artificial Sequence:  Nucleic Acid
ugugaacagccgaaaggcgagugaggucuagcugggu

SEQ ID NO: 1896 - RNA, 37 nt, Artificial Sequence
  Description of Artificial Sequence:  Nucleic Acid
ucugugaagccgaaaggcgagugaggucuacagcugg

SEQ ID NO: 1897 - RNA, 37 nt, Artificial Sequence
  Description of Artificial Sequence:  Nucleic Acid
gacggauggccgaaaggcgagugaggucucaggucug

SEQ ID NO: 1898 - RNA, 37 nt, Artificial Sequence
  Description of Artificial Sequence:  Nucleic Acid
guugucgagccgaaaggcgagugaggucuggaugcca

SEQ ID NO: 1899 - RNA, 37 nt, Artificial Sequence
  Description of Artificial Sequence:  Nucleic Acid
ugcugaaagccgaaaggcgagugaggucuucggaguu

SEQ ID NO: 1900 - RNA, 37 nt, Artificial Sequence
  Description of Artificial Sequence:  Nucleic Acid
agcagcuggccgaaaggcgagugaggucuugaaacuc

SEQ ID NO: 1901 - RNA, 37 nt, Artificial Sequence
  Description of Artificial Sequence:  Nucleic Acid
uucagcaggccgaaaggcgagugaggucuugcugaaa

SEQ ID NO: 1902 - RNA, 37 nt, Artificial Sequence
  Description of Artificial Sequence:  Nucleic Acid
ugguucaggccgaaaggcgagugaggucuagcugcug

SEQ ID NO: 1903 - RNA, 37 nt, Artificial Sequence
  Description of Artificial Sequence:  Nucleic Acid
cagguauggccgaaaggcgagugaggucuccugguuc

SEQ ID NO: 1904 - RNA, 37 nt, Artificial Sequence
  Description of Artificial Sequence:  Nucleic Acid
gggggccagccgaaaggcgagugaggucuagguaugc

SEQ ID NO: 1905 - RNA, 37 nt, Artificial Sequence
  Description of Artificial Sequence:  Nucleic Acid
gugggggggccgaaaggcgagugaggucucacaggua

SEQ ID NO: 1906 - RNA, 37 nt, Artificial Sequence
  Description of Artificial Sequence:  Nucleic Acid
agcauggggccgaaaggcgagugaggucuucaguugu

SEQ ID NO: 1907 - RNA, 37 nt, Artificial Sequence
  Description of Artificial Sequence:  Nucleic Acid
uccaucaggccgaaaggcgagugaggucuaugggcuc

SEQ ID NO: 1908 - RNA, 37 nt, Artificial Sequence
  Description of Artificial Sequence:  Nucleic Acid
ucaggguagccgaaaggcgagugaggucuuccaucag

SEQ ID NO: 1909 - RNA, 37 nt, Artificial Sequence
  Description of Artificial Sequence:  Nucleic Acid
aguuauaggccgaaaggcgagugaggucucucagggu

SEQ ID NO: 1910 - RNA, 37 nt, Artificial Sequence
  Description of Artificial Sequence:  Nucleic Acid
ucacuagggccgaaaggcgagugaggucugaguuaua

SEQ ID NO: 1911 - RNA, 37 nt, Artificial Sequence
  Description of Artificial Sequence:  Nucleic Acid
ggcugucagccgaaaggcgagugaggucuuaggcgag

SEQ ID NO: 1912 - RNA, 37 nt, Artificial Sequence
  Description of Artificial Sequence:  Nucleic Acid
ccucuggggccgaaaggcgagugaggucuugucacua

SEQ ID NO: 1913 - RNA, 37 nt, Artificial Sequence
  Description of Artificial Sequence:  Nucleic Acid
ucgggggggccgaaaggcgagugaggucucucugggc

SEQ ID NO: 1914 - RNA, 37 nt, Artificial Sequence
  Description of Artificial Sequence:  Nucleic Acid
agcaggaggccgaaaggcgagugaggucuugggucgg

SEQ ID NO: 1915 - RNA, 37 nt, Artificial Sequence
  Description of Artificial Sequence:  Nucleic Acid
caguggaggccgaaaggcgagugaggucuaggagcug

SEQ ID NO: 1916 - RNA, 37 nt, Artificial Sequence
  Description of Artificial Sequence:  Nucleic Acid
ccccgggggccgaaaggcgagugaggucuccccagug

SEQ ID NO: 1917 - RNA, 37 nt, Artificial Sequence
  Description of Artificial Sequence:  Nucleic Acid
uuggggaggccgaaaggcgagugaggucucccggggc

SEQ ID NO: 1918 - RNA, 37 nt, Artificial Sequence
  Description of Artificial Sequence:  Nucleic Acid
aaaggagggccgaaaggcgagugaggucucauugggg

SEQ ID NO: 1919 - RNA, 37 nt, Artificial Sequence
  Description of Artificial Sequence:  Nucleic Acid
cauguccggccgaaaggcgagugaggucuaauggagg

SEQ ID NO: 1920 - RNA, 37 nt, Artificial Sequence
  Description of Artificial Sequence:  Nucleic Acid
cagcaggggccgaaaggcgagugaggucuugagaagu

SEQ ID NO: 1921 - RNA, 37 nt, Artificial Sequence
  Description of Artificial Sequence:  Nucleic Acid
ugacucaggccgaaaggcgagugaggucuagggcuga

SEQ ID NO: 1922 - RNA, 37 nt, Artificial Sequence
  Description of Artificial Sequence:  Nucleic Acid
ugaucugagccgaaaggcgagugaggucuucagcagg

SEQ ID NO: 1923 - RNA, 37 nt, Artificial Sequence
  Description of Artificial Sequence:  Nucleic Acid
cuuaggaggccgaaaggcgagugaggucuugaucuga

SEQ ID NO: 1924 - RNA, 37 nt, Artificial Sequence
  Description of Artificial Sequence:  Nucleic Acid
aggcgucagccgaaaggcgagugaggucuccccuuag

SEQ ID NO: 1925 - RNA, 37 nt, Artificial Sequence
  Description of Artificial Sequence:  Nucleic Acid
agggcagggccgaaaggcgagugaggucugucacccc

SEQ ID NO: 1926 - RNA, 37 nt, Artificial Sequence
  Description of Artificial Sequence:  Nucleic Acid
ggggaggggccgaaaggcgagugaggucuaggcguca

SEQ ID NO: 1927 - RNA, 37 nt, Artificial Sequence
  Description of Artificial Sequence:  Nucleic Acid
aaccaguggccgaaaggcgagugaggucuucugggga

SEQ ID NO: 1928 - RNA, 37 nt, Artificial Sequence
  Description of Artificial Sequence:  Nucleic Acid
cccugcaagccgaaaggcgagugaggucucagugcuc

SEQ ID NO: 1929 - RNA, 37 nt, Artificial Sequence
  Description of Artificial Sequence:  Nucleic Acid
auccccuggccgaaaggcgagugaggucuaaccagug

SEQ ID NO: 1930 - RNA, 37 nt, Artificial Sequence
  Description of Artificial Sequence:  Nucleic Acid
uuggaggggccgaaaggcgagugaggucuuucaaucc

SEQ ID NO: 1931 - RNA, 37 nt, Artificial Sequence
  Description of Artificial Sequence:  Nucleic Acid
cguaaguggccgaaaggcgagugaggucuuuuuggag

SEQ ID NO: 1932 - RNA, 37 nt, Artificial Sequence
  Description of Artificial Sequence:  Nucleic Acid
acaccccagccgaaaggcgagugaggucucagaaucc

SEQ ID NO: 1933 - RNA, 37 nt, Artificial Sequence
  Description of Artificial Sequence:  Nucleic Acid
ggaacacagccgaaaggcgagugaggucucccaccag

SEQ ID NO: 1934 - RNA, 37 nt, Artificial Sequence
  Description of Artificial Sequence:  Nucleic Acid
uuggaacagccgaaaggcgagugaggucuaccccacc

SEQ ID NO: 1935 - RNA, 37 nt, Artificial Sequence
  Description of Artificial Sequence:  Nucleic Acid
aguuggaagccgaaaggcgagugaggucuacacccca

SEQ ID NO: 1936 - RNA, 37 nt, Artificial Sequence
  Description of Artificial Sequence:  Nucleic Acid
guuggggggccgaaaggcgagugaggucuaguuggaa

SEQ ID NO: 1937 - RNA, 37 nt, Artificial Sequence
  Description of Artificial Sequence:  Nucleic Acid
gacauccagccgaaaggcgagugaggucuaaaguugg

SEQ ID NO: 1938 - RNA, 37 nt, Artificial Sequence
  Description of Artificial Sequence:  Nucleic Acid
aaggaagagccgaaaggcgagugaggucuauccacaa

SEQ ID NO: 1939 - RNA, 37 nt, Artificial Sequence
  Description of Artificial Sequence:  Nucleic Acid
aaauaugggccgaaaggcgagugaggucuuccccccu

SEQ ID NO: 1940 - RNA, 37 nt, Artificial Sequence
  Description of Artificial Sequence:  Nucleic Acid
gauacugagccgaaaggcgagugaggucuaauaaaag

SEQ ID NO: 1941 - RNA, 37 nt, Artificial Sequence
  Description of Artificial Sequence:  Nucleic Acid
uacagauagccgaaaggcgagugaggucuugacaaua

SEQ ID NO: 1942 - RNA, 37 nt, Artificial Sequence
  Description of Artificial Sequence:  Nucleic Acid
gagagauagccgaaaggcgagugaggucuagauacug

SEQ ID NO: 1943 - RNA, 37 nt, Artificial Sequence
  Description of Artificial Sequence:  Nucleic Acid
cuuaagcagccgaaaggcgagugaggucucuccaaaa

SEQ ID NO: 1944 - RNA, 37 nt, Artificial Sequence
  Description of Artificial Sequence:  Nucleic Acid
ugcuuaaggccgaaaggcgagugaggucuaccuccaa

SEQ ID NO: 1945 - RNA, 37 nt, Artificial Sequence
  Description of Artificial Sequence:  Nucleic Acid
ugcuucuggccgaaaggcgagugaggucuuuaagcac

SEQ ID NO: 1946 - RNA, 37 nt, Artificial Sequence
  Description of Artificial Sequence:  Nucleic Acid
aguuaauggccgaaaggcgagugaggucuuucugcuu

SEQ ID NO: 1947 - RNA, 37 nt, Artificial Sequence
  Description of Artificial Sequence:  Nucleic Acid
uuccccaggccgaaaggcgagugaggucuuccccccu

SEQ ID NO: 1948 - RNA, 37 nt, Artificial Sequence
  Description of Artificial Sequence:  Nucleic Acid
caucaggagccgaaaggcgagugaggucuaggggaaa

SEQ ID NO: 1949 - RNA, 37 nt, Artificial Sequence
  Description of Artificial Sequence:  Nucleic Acid
ggagcugagccgaaaggcgagugaggucucaucagga

SEQ ID NO: 1950 - RNA, 37 nt, Artificial Sequence
  Description of Artificial Sequence:  Nucleic Acid
gaagggaggccgaaaggcgagugaggucuugaccauc

SEQ ID NO: 1951 - RNA, 37 nt, Artificial Sequence
  Description of Artificial Sequence:  Nucleic Acid
guucccuagccgaaaggcgagugaggucuagagaagg

SEQ ID NO: 1952 - RNA, 37 nt, Artificial Sequence
  Description of Artificial Sequence:  Nucleic Acid
ggaccccagccgaaaggcgagugaggucuaguucccu

SEQ ID NO: 1953 - RNA, 37 nt, Artificial Sequence
  Description of Artificial Sequence:  Nucleic Acid
augggggagccgaaaggcgagugaggucucccacagu

SEQ ID NO: 1954 - RNA, 37 nt, Artificial Sequence
  Description of Artificial Sequence:  Nucleic Acid
accagaaggccgaaaggcgagugaggucuuggaggau

SEQ ID NO: 1955 - RNA, 37 nt, Artificial Sequence
  Description of Artificial Sequence:  Nucleic Acid
ggagaguagccgaaaggcgagugaggucucagaagcu

SEQ ID NO: 1956 - RNA, 37 nt, Artificial Sequence
  Description of Artificial Sequence:  Nucleic Acid
ccagccuggccgaaaggcgagugaggucuuucugucu

SEQ ID NO: 1957 - RNA, 37 nt, Artificial Sequence
  Description of Artificial Sequence:  Nucleic Acid
accuccaggccgaaaggcgagugaggucucugcuucu

SEQ ID NO: 1958 - RNA, 37 nt, Artificial Sequence
  Description of Artificial Sequence:  Nucleic Acid
aggccuuagccgaaaggcgagugaggucucuccagcc

SEQ ID NO: 1959 - RNA, 37 nt, Artificial Sequence
  Description of Artificial Sequence:  Nucleic Acid
cucaaagggccgaaaggcgagugaggucucuuaccuc

SEQ ID NO: 1960 - RNA, 37 nt, Artificial Sequence
  Description of Artificial Sequence:  Nucleic Acid
uuuguggggccgaaaggcgagugaggucuucaaaggc

SEQ ID NO: 1961 - RNA, 37 nt, Artificial Sequence
  Description of Artificial Sequence:  Nucleic Acid
ugauaagggccgaaaggcgagugaggucuuuuguggg

SEQ ID NO: 1962 - RNA, 37 nt, Artificial Sequence
  Description of Artificial Sequence:  Nucleic Acid
ggaagacagccgaaaggcgagugaggucuuugauaag

SEQ ID NO: 1963 - RNA, 37 nt, Artificial Sequence
  Description of Artificial Sequence:  Nucleic Acid
auggaagagccgaaaggcgagugaggucuacuugaua

SEQ ID NO: 1964 - RNA, 37 nt, Artificial Sequence
  Description of Artificial Sequence:  Nucleic Acid
ugauuaaggccgaaaggcgagugaggucuuguaauga

SEQ ID NO: 1965 - RNA, 37 nt, Artificial Sequence
  Description of Artificial Sequence:  Nucleic Acid
aucugggggccgaaaggcgagugaggucuguuauuuu

SEQ ID NO: 1966 - RNA, 37 nt, Artificial Sequence
  Description of Artificial Sequence:  Nucleic Acid
uacagggggccgaaaggcgagugaggucuugguaucu

SEQ ID NO: 1967 - RNA, 37 nt, Artificial Sequence
  Description of Artificial Sequence:  Nucleic Acid
gugccauagccgaaaggcgagugaggucuaggggcug

SEQ ID NO: 1968 - RNA, 37 nt, Artificial Sequence
  Description of Artificial Sequence:  Nucleic Acid
ugccaguggccgaaaggcgagugaggucucauacagg

SEQ ID NO: 1969 - RNA, 37 nt, Artificial Sequence
  Description of Artificial Sequence:  Nucleic Acid
ggacaauggccgaaaggcgagugaggucucagugcca

SEQ ID NO: 1970 - RNA, 37 nt, Artificial Sequence
  Description of Artificial Sequence:  Nucleic Acid
cacagggagccgaaaggcgagugaggucuaaugccag

SEQ ID NO: 1971 - RNA, 37 nt, Artificial Sequence
  Description of Artificial Sequence:  Nucleic Acid
guuaggcagccgaaaggcgagugaggucuagggacaa

SEQ ID NO: 1972 - RNA, 37 nt, Artificial Sequence
  Description of Artificial Sequence:  Nucleic Acid
guguuagggccgaaaggcgagugaggucuacagggac

SEQ ID NO: 1973 - RNA, 37 nt, Artificial Sequence
  Description of Artificial Sequence:  Nucleic Acid
cucaaacggccgaaaggcgagugaggucuugguguua

SEQ ID NO: 1974 - RNA, 37 nt, Artificial Sequence
  Description of Artificial Sequence:  Nucleic Acid
cccucaaagccgaaaggcgagugaggucugcuggugu

SEQ ID NO: 1975 - RNA, 37 nt, Artificial Sequence
  Description of Artificial Sequence:  Nucleic Acid
gaaggcaggccgaaaggcgagugaggucucccucaaa

SEQ ID NO: 1976 - RNA, 37 nt, Artificial Sequence
  Description of Artificial Sequence:  Nucleic Acid
caggaagggccgaaaggcgagugaggucuagccccuc

SEQ ID NO: 1977 - RNA, 37 nt, Artificial Sequence
  Description of Artificial Sequence:  Nucleic Acid
cuguaggggccgaaaggcgagugaggucuaggaaggc

SEQ ID NO: 1978 - RNA, 37 nt, Artificial Sequence
  Description of Artificial Sequence:  Nucleic Acid
ggcagagagccgaaaggcgagugaggucucucuguag

SEQ ID NO: 1979 - RNA, 37 nt, Artificial Sequence
  Description of Artificial Sequence:  Nucleic Acid
agagccgggccgaaaggcgagugaggucuagagaccu

SEQ ID NO: 1980 - RNA, 37 nt, Artificial Sequence
  Description of Artificial Sequence:  Nucleic Acid
ggaaagaggccgaaaggcgagugaggucucggcagag

SEQ ID NO: 1981 - RNA, 37 nt, Artificial Sequence
  Description of Artificial Sequence:  Nucleic Acid
ugguugaggccgaaaggcgagugaggucuaaggaaag

SEQ ID NO: 1982 - RNA, 37 nt, Artificial Sequence
  Description of Artificial Sequence:  Nucleic Acid
uccuucaggccgaaaggcgagugaggucucaugguug

SEQ ID NO: 1983 - RNA, 37 nt, Artificial Sequence
  Description of Artificial Sequence:  Nucleic Acid
cuguugcagccgaaaggcgagugaggucuuguuuccu

SEQ ID NO: 1984 - RNA, 37 nt, Artificial Sequence
  Description of Artificial Sequence:  Nucleic Acid
ugcuguuggccgaaaggcgagugaggucuacuguuuc

SEQ ID NO: 1985 - RNA, 37 nt, Artificial Sequence
  Description of Artificial Sequence:  Nucleic Acid
agccaguggccgaaaggcgagugaggucuuguugcac

SEQ ID NO: 1986 - RNA, 37 nt, Artificial Sequence
  Description of Artificial Sequence:  Nucleic Acid
ggagagaggccgaaaggcgagugaggucucagugcug

SEQ ID NO: 1987 - RNA, 37 nt, Artificial Sequence
  Description of Artificial Sequence:  Nucleic Acid
agaccaaagccgaaaggcgagugaggucucccuucug

SEQ ID NO: 1988 - RNA, 37 nt, Artificial Sequence
  Description of Artificial Sequence:  Nucleic Acid
aguccagagccgaaaggcgagugaggucucaaacccc

SEQ ID NO: 1989 - RNA, 37 nt, Artificial Sequence
  Description of Artificial Sequence:  Nucleic Acid
ggggagaggccgaaaggcgagugaggucuaaggaagu

SEQ ID NO: 1990 - RNA, 37 nt, Artificial Sequence
  Description of Artificial Sequence:  Nucleic Acid
uuaaggcagccgaaaggcgagugaggucuuugagaag

SEQ ID NO: 1991 - RNA, 37 nt, Artificial Sequence
  Description of Artificial Sequence:  Nucleic Acid
uauuaagggccgaaaggcgagugaggucuacuugaga

SEQ ID NO: 1992 - RNA, 37 nt, Artificial Sequence
  Description of Artificial Sequence:  Nucleic Acid
uuacccuagccgaaaggcgagugaggucuuauuaagg

SEQ ID NO: 1993 - RNA, 37 nt, Artificial Sequence
  Description of Artificial Sequence:  Nucleic Acid
acaacuuagccgaaaggcgagugaggucuccuacuau

SEQ ID NO: 1994 - RNA, 37 nt, Artificial Sequence
  Description of Artificial Sequence:  Nucleic Acid
cuuaacaagccgaaaggcgagugaggucuuuacccua

SEQ ID NO: 1995 - RNA, 37 nt, Artificial Sequence
  Description of Artificial Sequence:  Nucleic Acid
acucuuaagccgaaaggcgagugaggucuaacuuacc

SEQ ID NO: 1996 - RNA, 37 nt, Artificial Sequence
  Description of Artificial Sequence:  Nucleic Acid
cucccccagccgaaaggcgagugaggucuucuuaaca

SEQ ID NO: 1997 - RNA, 37 nt, Artificial Sequence
  Description of Artificial Sequence:  Nucleic Acid
ccagccuggccgaaaggcgagugaggucuucuccccc

SEQ ID NO: 1998 - RNA, 37 nt, Artificial Sequence
  Description of Artificial Sequence:  Nucleic Acid
gcugccaggccgaaaggcgagugaggucucugcucuc

SEQ ID NO: 1999 - RNA, 37 nt, Artificial Sequence
  Description of Artificial Sequence:  Nucleic Acid
gagagcuggccgaaaggcgagugaggucucagccugc

SEQ ID NO: 2000 - RNA, 37 nt, Artificial Sequence
  Description of Artificial Sequence:  Nucleic Acid
cuggagaggccgaaaggcgagugaggucuugccagcc

SEQ ID NO: 2001 - RNA, 37 nt, Artificial Sequence
  Description of Artificial Sequence:  Nucleic Acid
ccuccugagccgaaaggcgagugaggucuuggagagc

SEQ ID NO: 2002 - RNA, 37 nt, Artificial Sequence
  Description of Artificial Sequence:  Nucleic Acid
aaacuauggccgaaaggcgagugaggucucuccugac

SEQ ID NO: 2003 - RNA, 37 nt, Artificial Sequence
  Description of Artificial Sequence:  Nucleic Acid
acuaaaaagccgaaaggcgagugaggucuuaugccuc

SEQ ID NO: 2004 - RNA, 37 nt, Artificial Sequence
  Description of Artificial Sequence:  Nucleic Acid
auuguucagccgaaaggcgagugaggucuuaaaaacu

SEQ ID NO: 2005 - RNA, 37 nt, Artificial Sequence
  Description of Artificial Sequence:  Nucleic Acid
uccaaguggccgaaaggcgagugaggucuuuugauug

SEQ ID NO: 2006 - RNA, 37 nt, Artificial Sequence
  Description of Artificial Sequence:  Nucleic Acid
agaaagaggccgaaaggcgagugaggucuaagagucc

SEQ ID NO: 2007 - RNA, 37 nt, Artificial Sequence
  Description of Artificial Sequence:  Nucleic Acid
ggcaacaggccgaaaggcgagugaggucuuuuauuag

SEQ ID NO: 2008 - RNA, 37 nt, Artificial Sequence
  Description of Artificial Sequence:  Nucleic Acid
cuuggcaagccgaaaggcgagugaggucuagcuuuau

SEQ ID NO: 2009 - RNA, 37 nt, Artificial Sequence
  Description of Artificial Sequence:  Nucleic Acid
cagcuugggccgaaaggcgagugaggucuaacagcuu

SEQ ID NO: 2010 - RNA, 37 nt, Artificial Sequence
  Description of Artificial Sequence:  Nucleic Acid
ccguccaggccgaaaggcgagugaggucuuuggcaac

SEQ ID NO: 2011 - RNA, 37 nt, Artificial Sequence
  Description of Artificial Sequence:  Nucleic Acid
agcucguggccgaaaggcgagugaggucucguccagc

SEQ ID NO: 2012 - RNA, 37 nt, Artificial Sequence
  Description of Artificial Sequence:  Nucleic Acid
ggcacgaggccgaaaggcgagugaggucuucgugccg

SEQ ID NO: 2013 - RNA, 17 nt, Artificial Sequence
  Description of Artificial Sequence:  Nucleic Acid
cggcauggacgaacugu

SEQ ID NO: 2014 - RNA, 17 nt, Artificial Sequence
  Description of Artificial Sequence:  Nucleic Acid
auggacgaacuguuccc

SEQ ID NO: 2015 - RNA, 17 nt, Artificial Sequence
  Description of Artificial Sequence:  Nucleic Acid
cuuccgcuacaagugcg

SEQ ID NO: 2016 - RNA, 17 nt, Artificial Sequence
  Description of Artificial Sequence:  Nucleic Acid
gagcacagauaccacca

SEQ ID NO: 2017 - RNA, 17 nt, Artificial Sequence
  Description of Artificial Sequence:  Nucleic Acid
gcacagauaccaccaag

SEQ ID NO: 2018 - RNA, 17 nt, Artificial Sequence
  Description of Artificial Sequence:  Nucleic Acid
ccaccaagacccacccc

SEQ ID NO: 2019 - RNA, 17 nt, Artificial Sequence
  Description of Artificial Sequence:  Nucleic Acid
ccaucaagaucaauggc

SEQ ID NO: 2020 - RNA, 17 nt, Artificial Sequence
  Description of Artificial Sequence:  Nucleic Acid
caagaucaauggcuaca

SEQ ID NO: 2021 - RNA, 17 nt, Artificial Sequence
  Description of Artificial Sequence:  Nucleic Acid
caauggcuacacaggac

SEQ ID NO: 2022 - RNA, 17 nt, Artificial Sequence
  Description of Artificial Sequence:  Nucleic Acid
uacacaggaccagggac

SEQ ID NO: 2023 - RNA, 17 nt, Artificial Sequence
  Description of Artificial Sequence:  Nucleic Acid
gaccagggacagugcgc

SEQ ID NO: 2024 - RNA, 17 nt, Artificial Sequence
  Description of Artificial Sequence:  Nucleic Acid
caccaaggacccuccuc

SEQ ID NO: 2025 - RNA, 17 nt, Artificial Sequence
  Description of Artificial Sequence:  Nucleic Acid
aggaaaggacugccggg

SEQ ID NO: 2026 - RNA, 17 nt, Artificial Sequence
  Description of Artificial Sequence:  Nucleic Acid
cugccgggauggcuucu

SEQ ID NO: 2027 - RNA, 17 nt, Artificial Sequence
  Description of Artificial Sequence:  Nucleic Acid
uggcuucuaugaggcug

SEQ ID NO: 2028 - RNA, 17 nt, Artificial Sequence
  Description of Artificial Sequence:  Nucleic Acid
cugcccggaccgcugca

SEQ ID NO: 2029 - RNA, 17 nt, Artificial Sequence
  Description of Artificial Sequence:  Nucleic Acid
uuuccagaaccugggaa

SEQ ID NO: 2030 - RNA, 17 nt, Artificial Sequence
  Description of Artificial Sequence:  Nucleic Acid
accugggaauccagugu

SEQ ID NO: 2031 - RNA, 17 nt, Artificial Sequence
  Description of Artificial Sequence:  Nucleic Acid
gaagcgggaccuggagc

SEQ ID NO: 2032 - RNA, 17 nt, Artificial Sequence
  Description of Artificial Sequence:  Nucleic Acid
agcaggcuaucagucag

SEQ ID NO: 2033 - RNA, 17 nt, Artificial Sequence
  Description of Artificial Sequence:  Nucleic Acid
gcauccagaccaacaac

SEQ ID NO: 2034 - RNA, 17 nt, Artificial Sequence
  Description of Artificial Sequence:  Nucleic Acid
ccagaccaacaacaacc

SEQ ID NO: 2035 - RNA, 17 nt, Artificial Sequence
  Description of Artificial Sequence:  Nucleic Acid
gaccaacaacaaccccu

SEQ ID NO: 2036 - RNA, 17 nt, Artificial Sequence
  Description of Artificial Sequence:  Nucleic Acid
caacaacaaccccuucc

SEQ ID NO: 2037 - RNA, 17 nt, Artificial Sequence
  Description of Artificial Sequence:  Nucleic Acid
aaguuccuauagaagag

SEQ ID NO: 2038 - RNA, 17 nt, Artificial Sequence
  Description of Artificial Sequence:  Nucleic Acid
gcguggggacuacgacc

SEQ ID NO: 2039 - RNA, 17 nt, Artificial Sequence
  Description of Artificial Sequence:  Nucleic Acid
uggggacuacgaccuga

SEQ ID NO: 2040 - RNA, 17 nt, Artificial Sequence
  Description of Artificial Sequence:  Nucleic Acid
ggacuacgaccugaaug

SEQ ID NO: 2041 - RNA, 17 nt, Artificial Sequence
  Description of Artificial Sequence:  Nucleic Acid
cgaccugaaugcugugc

SEQ ID NO: 2042 - RNA, 17 nt, Artificial Sequence
  Description of Artificial Sequence:  Nucleic Acid
uccaggugacagugcgg

SEQ ID NO: 2043 - RNA, 17 nt, Artificial Sequence
  Description of Artificial Sequence:  Nucleic Acid
agugcgggacccaucag

SEQ ID NO: 2044 - RNA, 17 nt, Artificial Sequence
  Description of Artificial Sequence:  Nucleic Acid
caucuuugacaaucgug

SEQ ID NO: 2045 - RNA, 17 nt, Artificial Sequence
  Description of Artificial Sequence:  Nucleic Acid
cuuugacaaucgugccc

SEQ ID NO: 2046 - RNA, 17 nt, Artificial Sequence
  Description of Artificial Sequence:  Nucleic Acid
ugcccccaacacugccg

SEQ ID NO: 2047 - RNA, 17 nt, Artificial Sequence
  Description of Artificial Sequence:  Nucleic Acid
agcucaagaucugccga

SEQ ID NO: 2048 - RNA, 17 nt, Artificial Sequence
  Description of Artificial Sequence:  Nucleic Acid
ccgagugaaccgaaacu

SEQ ID NO: 2049 - RNA, 17 nt, Artificial Sequence
  Description of Artificial Sequence:  Nucleic Acid
gaaccgaaacucuggca

SEQ ID NO: 2050 - RNA, 17 nt, Artificial Sequence
  Description of Artificial Sequence:  Nucleic Acid
cgguggggaugagaucu

SEQ ID NO: 2051 - RNA, 17 nt, Artificial Sequence
  Description of Artificial Sequence:  Nucleic Acid
gggaugagaucuuccua

SEQ ID NO: 2052 - RNA, 17 nt, Artificial Sequence
  Description of Artificial Sequence:  Nucleic Acid
aucuuccuacuguguga

SEQ ID NO: 2053 - RNA, 17 nt, Artificial Sequence
  Description of Artificial Sequence:  Nucleic Acid
acugugugacaaggugc

SEQ ID NO: 2054 - RNA, 17 nt, Artificial Sequence
  Description of Artificial Sequence:  Nucleic Acid
gaaagaggacauugagg

SEQ ID NO: 2055 - RNA, 17 nt, Artificial Sequence
  Description of Artificial Sequence:  Nucleic Acid
ugagguguauuucacgg

SEQ ID NO: 2056 - RNA, 17 nt, Artificial Sequence
  Description of Artificial Sequence:  Nucleic Acid
uucacgggaccaggcug

SEQ ID NO: 2057 - RNA, 17 nt, Artificial Sequence
  Description of Artificial Sequence:  Nucleic Acid
gcaagcugaugugcacc

SEQ ID NO: 2058 - RNA, 17 nt, Artificial Sequence
  Description of Artificial Sequence:  Nucleic Acid
gugcaccgacaaguggc

SEQ ID NO: 2059 - RNA, 17 nt, Artificial Sequence
  Description of Artificial Sequence:  Nucleic Acid
uguuccggaccccuccc

SEQ ID NO: 2060 - RNA, 17 nt, Artificial Sequence
  Description of Artificial Sequence:  Nucleic Acid
cccucccuacgcagacc

SEQ ID NO: 2061 - RNA, 17 nt, Artificial Sequence
  Description of Artificial Sequence:  Nucleic Acid
cuacgcagaccccagcc

SEQ ID NO: 2062 - RNA, 17 nt, Artificial Sequence
  Description of Artificial Sequence:  Nucleic Acid
gccuuccgaccgggagc

SEQ ID NO: 2063 - RNA, 17 nt, Artificial Sequence
  Description of Artificial Sequence:  Nucleic Acid
cccauggaauuccagua

SEQ ID NO: 2064 - RNA, 17 nt, Artificial Sequence
  Description of Artificial Sequence:  Nucleic Acid
auuccaguaccugccag

SEQ ID NO: 2065 - RNA, 17 nt, Artificial Sequence
  Description of Artificial Sequence:  Nucleic Acid
ccugccagauacagacg

SEQ ID NO: 2066 - RNA, 17 nt, Artificial Sequence
  Description of Artificial Sequence:  Nucleic Acid
ugccagauacagacgau

SEQ ID NO: 2067 - RNA, 17 nt, Artificial Sequence
  Description of Artificial Sequence:  Nucleic Acid
agauacagacgaucguc

SEQ ID NO: 2068 - RNA, 17 nt, Artificial Sequence
  Description of Artificial Sequence:  Nucleic Acid
uacagacgaucgucacc

SEQ ID NO: 2069 - RNA, 17 nt, Artificial Sequence
  Description of Artificial Sequence:  Nucleic Acid
gucaccggauugaggag

SEQ ID NO: 2070 - RNA, 17 nt, Artificial Sequence
  Description of Artificial Sequence:  Nucleic Acid
gaggagaaacguaaaag

SEQ ID NO: 2071 - RNA, 17 nt, Artificial Sequence
  Description of Artificial Sequence:  Nucleic Acid
guaaaaggacauaugag

SEQ ID NO: 2072 - RNA, 17 nt, Artificial Sequence
  Description of Artificial Sequence:  Nucleic Acid
aaggacauaugagaccu

SEQ ID NO: 2073 - RNA, 17 nt, Artificial Sequence
  Description of Artificial Sequence:  Nucleic Acid
cauaugagaccuucaag

SEQ ID NO: 2074 - RNA, 17 nt, Artificial Sequence
  Description of Artificial Sequence:  Nucleic Acid
uucagcggacccaccga

SEQ ID NO: 2075 - RNA, 17 nt, Artificial Sequence
  Description of Artificial Sequence:  Nucleic Acid
acccaccgacccccggc

SEQ ID NO: 2076 - RNA, 17 nt, Artificial Sequence
  Description of Artificial Sequence:  Nucleic Acid
ccaccucgacgcauugc

SEQ ID NO: 2077 - RNA, 17 nt, Artificial Sequence
  Description of Artificial Sequence:  Nucleic Acid
ccagcccuaucccuuua

SEQ ID NO: 2078 - RNA, 17 nt, Artificial Sequence
  Description of Artificial Sequence:  Nucleic Acid
aucccuuuacgucaucc

SEQ ID NO: 2079 - RNA, 17 nt, Artificial Sequence
  Description of Artificial Sequence:  Nucleic Acid
caccaucaacuaugaug

SEQ ID NO: 2080 - RNA, 17 nt, Artificial Sequence
  Description of Artificial Sequence:  Nucleic Acid
caucaacuaugaugagu

SEQ ID NO: 2081 - RNA, 17 nt, Artificial Sequence
  Description of Artificial Sequence:  Nucleic Acid
caacuaugaugaguuuc

SEQ ID NO: 2082 - RNA, 17 nt, Artificial Sequence
  Description of Artificial Sequence:  Nucleic Acid
cugggcagaucagccag

SEQ ID NO: 2083 - RNA, 17 nt, Artificial Sequence
  Description of Artificial Sequence:  Nucleic Acid
gccaugguaucagcucu

SEQ ID NO: 2084 - RNA, 17 nt, Artificial Sequence
  Description of Artificial Sequence:  Nucleic Acid
gggaaggaacgcuguca

SEQ ID NO: 2085 - RNA, 17 nt, Artificial Sequence
  Description of Artificial Sequence:  Nucleic Acid
gcaguuugaugaugaag

SEQ ID NO: 2086 - RNA, 17 nt, Artificial Sequence
  Description of Artificial Sequence:  Nucleic Acid
guuugaugaugaagacc

SEQ ID NO: 2087 - RNA, 17 nt, Artificial Sequence
  Description of Artificial Sequence:  Nucleic Acid
ugaugaagaccuggggg

SEQ ID NO: 2088 - RNA, 17 nt, Artificial Sequence
  Description of Artificial Sequence:  Nucleic Acid
gcuuggcaacagcacag

SEQ ID NO: 2089 - RNA, 17 nt, Artificial Sequence
  Description of Artificial Sequence:  Nucleic Acid
cagcacagacccagcug

SEQ ID NO: 2090 - RNA, 17 nt, Artificial Sequence
  Description of Artificial Sequence:  Nucleic Acid
guucacagaccuggcau

SEQ ID NO: 2091 - RNA, 17 nt, Artificial Sequence
  Description of Artificial Sequence:  Nucleic Acid
auccgucgacaacuccg

SEQ ID NO: 2092 - RNA, 17 nt, Artificial Sequence
  Description of Artificial Sequence:  Nucleic Acid
cgucgacaacuccgagu

SEQ ID NO: 2093 - RNA, 17 nt, Artificial Sequence
  Description of Artificial Sequence:  Nucleic Acid
gcugcugaaccagggca

SEQ ID NO: 2094 - RNA, 17 nt, Artificial Sequence
  Description of Artificial Sequence:  Nucleic Acid
cagggcauaccuguggc

SEQ ID NO: 2095 - RNA, 17 nt, Artificial Sequence
  Description of Artificial Sequence:  Nucleic Acid
cccacacaacugagccc

SEQ ID NO: 2096 - RNA, 17 nt, Artificial Sequence
  Description of Artificial Sequence:  Nucleic Acid
ccaugcugauggaguac

SEQ ID NO: 2097 - RNA, 17 nt, Artificial Sequence
  Description of Artificial Sequence:  Nucleic Acid
gauggaguacccugagg

SEQ ID NO: 2098 - RNA, 17 nt, Artificial Sequence
  Description of Artificial Sequence:  Nucleic Acid
cugaggcuauaacucgc

SEQ ID NO: 2099 - RNA, 17 nt, Artificial Sequence
  Description of Artificial Sequence:  Nucleic Acid
aggcuauaacucgccua

SEQ ID NO: 2100 - RNA, 17 nt, Artificial Sequence
  Description of Artificial Sequence:  Nucleic Acid
gccuagugacagcccag

SEQ ID NO: 2101 - RNA, 17 nt, Artificial Sequence
  Description of Artificial Sequence:  Nucleic Acid
gccccccgacccagcuc

SEQ ID NO: 2102 - RNA, 17 nt, Artificial Sequence
  Description of Artificial Sequence:  Nucleic Acid
gcuccccaauggccucc

SEQ ID NO: 2103 - RNA, 17 nt, Artificial Sequence
  Description of Artificial Sequence:  Nucleic Acid
uucaggagaugaagacu

SEQ ID NO: 2104 - RNA, 17 nt, Artificial Sequence
  Description of Artificial Sequence:  Nucleic Acid
agaugaagacuucuccu

SEQ ID NO: 2105 - RNA, 17 nt, Artificial Sequence
  Description of Artificial Sequence:  Nucleic Acid
cauugcggacauggacu

SEQ ID NO: 2106 - RNA, 17 nt, Artificial Sequence
  Description of Artificial Sequence:  Nucleic Acid
ggacauggacuucucag

SEQ ID NO: 2107 - RNA, 17 nt, Artificial Sequence
  Description of Artificial Sequence:  Nucleic Acid
ugagucagaucagcucc

SEQ ID NO: 2108 - RNA, 17 nt, Artificial Sequence
  Description of Artificial Sequence:  Nucleic Acid
agggggugacgccugcc

SEQ ID NO: 2109 - RNA, 17 nt, Artificial Sequence
  Description of Artificial Sequence:  Nucleic Acid
ugcaggggauugaagcc

SEQ ID NO: 2110 - RNA, 17 nt, Artificial Sequence
  Description of Artificial Sequence:  Nucleic Acid
aagcacuuacggauucu

SEQ ID NO: 2111 - RNA, 17 nt, Artificial Sequence
  Description of Artificial Sequence:  Nucleic Acid
acuuacggauucuggug

SEQ ID NO: 2112 - RNA, 17 nt, Artificial Sequence
  Description of Artificial Sequence:  Nucleic Acid
guguuccaacugccccc

SEQ ID NO: 2113 - RNA, 17 nt, Artificial Sequence
  Description of Artificial Sequence:  Nucleic Acid
ugcccccaacuuugugg

SEQ ID NO: 2114 - RNA, 17 nt, Artificial Sequence
  Description of Artificial Sequence:  Nucleic Acid
cuuuguggaugucuucc

SEQ ID NO: 2115 - RNA, 17 nt, Artificial Sequence
  Description of Artificial Sequence:  Nucleic Acid
ggagccauauuuuauuc

SEQ ID NO: 2116 - RNA, 17 nt, Artificial Sequence
  Description of Artificial Sequence:  Nucleic Acid
cauauuuuauucuuuua

SEQ ID NO: 2117 - RNA, 17 nt, Artificial Sequence
  Description of Artificial Sequence:  Nucleic Acid
auucuuuuauugucagu

SEQ ID NO: 2118 - RNA, 17 nt, Artificial Sequence
  Description of Artificial Sequence:  Nucleic Acid
uugucaguaucuguauc

SEQ ID NO: 2119 - RNA, 17 nt, Artificial Sequence
  Description of Artificial Sequence:  Nucleic Acid
guaucuguaucucucuc

SEQ ID NO: 2120 - RNA, 17 nt, Artificial Sequence
  Description of Artificial Sequence:  Nucleic Acid
aagcauuaacuucucug

SEQ ID NO: 2121 - RNA, 17 nt, Artificial Sequence
  Description of Artificial Sequence:  Nucleic Acid
cuggggaaacucaaacu

SEQ ID NO: 2122 - RNA, 17 nt, Artificial Sequence
  Description of Artificial Sequence:  Nucleic Acid
aaacucaaacuuuuccc

SEQ ID NO: 2123 - RNA, 17 nt, Artificial Sequence
  Description of Artificial Sequence:  Nucleic Acid
cuguccugauggucagc

SEQ ID NO: 2124 - RNA, 17 nt, Artificial Sequence
  Description of Artificial Sequence:  Nucleic Acid
uguagggaacugugggg

SEQ ID NO: 2125 - RNA, 17 nt, Artificial Sequence
  Description of Artificial Sequence:  Nucleic Acid
cuucugguacucuccua

SEQ ID NO: 2126 - RNA, 17 nt, Artificial Sequence
  Description of Artificial Sequence:  Nucleic Acid
uccuagagacagaagca

SEQ ID NO: 2127 - RNA, 17 nt, Artificial Sequence
  Description of Artificial Sequence:  Nucleic Acid
aaagccuuaucaagugu

SEQ ID NO: 2128 - RNA, 17 nt, Artificial Sequence
  Description of Artificial Sequence:  Nucleic Acid
caucauggauucauuac

SEQ ID NO: 2129 - RNA, 17 nt, Artificial Sequence
  Description of Artificial Sequence:  Nucleic Acid
gauucauuacagcuuaa

SEQ ID NO: 2130 - RNA, 17 nt, Artificial Sequence
  Description of Artificial Sequence:  Nucleic Acid
acagcuuaaucaaaaua

SEQ ID NO: 2131 - RNA, 17 nt, Artificial Sequence
  Description of Artificial Sequence:  Nucleic Acid
uaaucaaaauaacgccc

SEQ ID NO: 2132 - RNA, 17 nt, Artificial Sequence
  Description of Artificial Sequence:  Nucleic Acid
ucaaaauaacgccccag

SEQ ID NO: 2133 - RNA, 17 nt, Artificial Sequence
  Description of Artificial Sequence:  Nucleic Acid
cgccccagauaccagcc

SEQ ID NO: 2134 - RNA, 17 nt, Artificial Sequence
  Description of Artificial Sequence:  Nucleic Acid
ccccagauaccagcccc

SEQ ID NO: 2135 - RNA, 17 nt, Artificial Sequence
  Description of Artificial Sequence:  Nucleic Acid
gccccuguauggcacug

SEQ ID NO: 2136 - RNA, 17 nt, Artificial Sequence
  Description of Artificial Sequence:  Nucleic Acid
ugugccuaacaccagcg

SEQ ID NO: 2137 - RNA, 17 nt, Artificial Sequence
  Description of Artificial Sequence:  Nucleic Acid
ccugcccuacagagguc

SEQ ID NO: 2138 - RNA, 17 nt, Artificial Sequence
  Description of Artificial Sequence:  Nucleic Acid
cuugcucaaccauggcu

SEQ ID NO: 2139 - RNA, 17 nt, Artificial Sequence
  Description of Artificial Sequence:  Nucleic Acid
ugaaggaaacagugcaa

SEQ ID NO: 2140 - RNA, 17 nt, Artificial Sequence
  Description of Artificial Sequence:  Nucleic Acid
acagugcaacagcacug

SEQ ID NO: 2141 - RNA, 17 nt, Artificial Sequence
  Description of Artificial Sequence:  Nucleic Acid
ucuccaggauccagaag

SEQ ID NO: 2142 - RNA, 17 nt, Artificial Sequence
  Description of Artificial Sequence:  Nucleic Acid
uggucuggacuuccuug

SEQ ID NO: 2143 - RNA, 17 nt, Artificial Sequence
  Description of Artificial Sequence:  Nucleic Acid
gugccuuaauaguaggg

SEQ ID NO: 2144 - RNA, 17 nt, Artificial Sequence
  Description of Artificial Sequence:  Nucleic Acid
uuuagugaacaaucaaa

SEQ ID NO: 2145 - RNA, 17 nt, Artificial Sequence
  Description of Artificial Sequence:  Nucleic Acid
agugaacaaucaaagca

SEQ ID NO: 2146 - RNA, 17 nt, Artificial Sequence
  Description of Artificial Sequence:  Nucleic Acid
gcacuuggacucuugcu

SEQ ID NO: 2147 - RNA, 17 nt, Artificial Sequence
  Description of Artificial Sequence:  Nucleic Acid
cucuuucuacucugaac

SEQ ID NO: 2148 - RNA, 17 nt, Artificial Sequence
  Description of Artificial Sequence:  Nucleic Acid
uacucugaacuaauaaa

SEQ ID NO: 2149 - RNA, 17 nt, Artificial Sequence
  Description of Artificial Sequence:  Nucleic Acid
cugaacuaauaaagcug

SEQ ID NO: 2150 - RNA, 17 nt, Artificial Sequence
  Description of Artificial Sequence:  Nucleic Acid
caagcuggacggcacga

SEQ ID NO: 2151 - DNA, 31 bp, Artificial Sequence
  Description of Artificial Sequence:  Nucleic Acid
cggccccgggctagctacaacgactcgtgcc

SEQ ID NO: 2152 - DNA, 31 bp, Artificial Sequence
  Description of Artificial Sequence:  Nucleic Acid
cgacccggggctagctacaacgacccgcctc

SEQ ID NO: 2153 - DNA, 31 bp, Artificial Sequence
  Description of Artificial Sequence:  Nucleic Acid
agctgcgaggctagctacaacgaccggcccc

SEQ ID NO: 2154 - DNA, 31 bp, Artificial Sequence
  Description of Artificial Sequence:  Nucleic Acid
cccagctgggctagctacaacgagacccggc

SEQ ID NO: 2155 - DNA, 31 bp, Artificial Sequence
  Description of Artificial Sequence:  Nucleic Acid
gggcccagggctagctacaacgatgcgaccc

SEQ ID NO: 2156 - DNA, 31 bp, Artificial Sequence
  Description of Artificial Sequence:  Nucleic Acid
gccgcgggggctagctacaacgaccagctgc

SEQ ID NO: 2157 - DNA, 31 bp, Artificial Sequence
  Description of Artificial Sequence:  Nucleic Acid
ccatgccgggctagctacaacgagggcccag

SEQ ID NO: 2158 - DNA, 31 bp, Artificial Sequence
  Description of Artificial Sequence:  Nucleic Acid
cgtccatgggctagctacaacgacgcgggcc

SEQ ID NO: 2159 - DNA, 31 bp, Artificial Sequence
  Description of Artificial Sequence:  Nucleic Acid
ttcgtccaggctagctacaacgagccgcggg

SEQ ID NO: 2160 - DNA, 31 bp, Artificial Sequence
  Description of Artificial Sequence:  Nucleic Acid
acagttcgggctagctacaacgaccatgccg

SEQ ID NO: 2161 - DNA, 31 bp, Artificial Sequence
  Description of Artificial Sequence:  Nucleic Acid
gggaacagggctagctacaacgatcgtccat

SEQ ID NO: 2162 - DNA, 31 bp, Artificial Sequence
  Description of Artificial Sequence:  Nucleic Acid
agggggaaggctagctacaacgaagttcgtc

SEQ ID NO: 2163 - DNA, 31 bp, Artificial Sequence
  Description of Artificial Sequence:  Nucleic Acid
cgggaagaggctagctacaacgagaggggga

SEQ ID NO: 2164 - DNA, 31 bp, Artificial Sequence
  Description of Artificial Sequence:  Nucleic Acid
ctgctctgggctagctacaacgacgggaaga

SEQ ID NO: 2165 - DNA, 31 bp, Artificial Sequence
  Description of Artificial Sequence:  Nucleic Acid
ttgggctgggctagctacaacgatctgccgg

SEQ ID NO: 2166 - DNA, 31 bp, Artificial Sequence
  Description of Artificial Sequence:  Nucleic Acid
tgcttgggggctagctacaacgatgctctgc

SEQ ID NO: 2167 - DNA, 31 bp, Artificial Sequence
  Description of Artificial Sequence:  Nucleic Acid
ccccgctgggctagctacaacgattgggctg

SEQ ID NO: 2168 - DNA, 31 bp, Artificial Sequence
  Description of Artificial Sequence:  Nucleic Acid
atgccccgggctagctacaacgatgcttggg

SEQ ID NO: 2169 - DNA, 31 bp, Artificial Sequence
  Description of Artificial Sequence:  Nucleic Acid
agcgcatgggctagctacaacgacccgctgc

SEQ ID NO: 2170 - DNA, 31 bp, Artificial Sequence
  Description of Artificial Sequence:  Nucleic Acid
gaagcgcaggctagctacaacgagccccgct

SEQ ID NO: 2171 - DNA, 31 bp, Artificial Sequence
  Description of Artificial Sequence:  Nucleic Acid
cggaagcgggctagctacaacgaatgccccg

SEQ ID NO: 2172 - DNA, 31 bp, Artificial Sequence
  Description of Artificial Sequence:  Nucleic Acid
agcggaagggctagctacaacgagcatgccc

SEQ ID NO: 2173 - DNA, 31 bp, Artificial Sequence
  Description of Artificial Sequence:  Nucleic Acid
acttgtagggctagctacaacgaggaagcgc

SEQ ID NO: 2174 - DNA, 31 bp, Artificial Sequence
  Description of Artificial Sequence:  Nucleic Acid
cgcacttgggctagctacaacgaagcggaag

SEQ ID NO: 2175 - DNA, 31 bp, Artificial Sequence
  Description of Artificial Sequence:  Nucleic Acid
ccctcgcaggctagctacaacgattgtagcg

SEQ ID NO: 2176 - DNA, 31 bp, Artificial Sequence
  Description of Artificial Sequence:  Nucleic Acid
gcccctcgggctagctacaacgaacttgtag

SEQ ID NO: 2177 - DNA, 31 bp, Artificial Sequence
  Description of Artificial Sequence:  Nucleic Acid
gcggagcgggctagctacaacgaccctcgca

SEQ ID NO: 2178 - DNA, 31 bp, Artificial Sequence
  Description of Artificial Sequence:  Nucleic Acid
ccgcggagggctagctacaacgagcccctcg

SEQ ID NO: 2179 - DNA, 31 bp, Artificial Sequence
  Description of Artificial Sequence:  Nucleic Acid
gctgcccgggctagctacaacgaggagcgcc

SEQ ID NO: 2180 - DNA, 31 bp, Artificial Sequence
  Description of Artificial Sequence:  Nucleic Acid
ggatgctgggctagctacaacgaccgcggag

SEQ ID NO: 2181 - DNA, 31 bp, Artificial Sequence
  Description of Artificial Sequence:  Nucleic Acid
ctgggatgggctagctacaacgatgcccgcg

SEQ ID NO: 2182 - DNA, 31 bp, Artificial Sequence
  Description of Artificial Sequence:  Nucleic Acid
gcctgggaggctagctacaacgagctgcccg

SEQ ID NO: 2183 - DNA, 31 bp, Artificial Sequence
  Description of Artificial Sequence:  Nucleic Acid
tcctctcgggctagctacaacgactgggatg

SEQ ID NO: 2184 - DNA, 31 bp, Artificial Sequence
  Description of Artificial Sequence:  Nucleic Acid
tatctgtgggctagctacaacgatcctctcg

SEQ ID NO: 2185 - DNA, 31 bp, Artificial Sequence
  Description of Artificial Sequence:  Nucleic Acid
ggtatctgggctagctacaacgagctcctct

SEQ ID NO: 2186 - DNA, 31 bp, Artificial Sequence
  Description of Artificial Sequence:  Nucleic Acid
tggtggtaggctagctacaacgactgtgctc

SEQ ID NO: 2187 - DNA, 31 bp, Artificial Sequence
  Description of Artificial Sequence:  Nucleic Acid
cttggtggggctagctacaacgaatctgtgc

SEQ ID NO: 2188 - DNA, 31 bp, Artificial Sequence
  Description of Artificial Sequence:  Nucleic Acid
ggtcttggggctagctacaacgaggtatctg

SEQ ID NO: 2189 - DNA, 31 bp, Artificial Sequence
  Description of Artificial Sequence:  Nucleic Acid
ggggtgggggctagctacaacgacttggtgg

SEQ ID NO: 2190 - DNA, 31 bp, Artificial Sequence
  Description of Artificial Sequence:  Nucleic Acid
tggtggggggctagctacaacgagggtcttg

SEQ ID NO: 2191 - DNA, 31 bp, Artificial Sequence
  Description of Artificial Sequence:  Nucleic Acid
cttgatggggctagctacaacgaggggtggg

SEQ ID NO: 2192 - DNA, 31 bp, Artificial Sequence
  Description of Artificial Sequence:  Nucleic Acid
gatcttgaggctagctacaacgaggtggggt

SEQ ID NO: 2193 - DNA, 31 bp, Artificial Sequence
  Description of Artificial Sequence:  Nucleic Acid
gccattgaggctagctacaacgacttgatgg

SEQ ID NO: 2194 - DNA, 31 bp, Artificial Sequence
  Description of Artificial Sequence:  Nucleic Acid
tgtagccaggctagctacaacgatgatcttg

SEQ ID NO: 2195 - DNA, 31 bp, Artificial Sequence
  Description of Artificial Sequence:  Nucleic Acid
ctgtgtagggctagctacaacgacattgatc

SEQ ID NO: 2196 - DNA, 31 bp, Artificial Sequence
  Description of Artificial Sequence:  Nucleic Acid
gtcctgtgggctagctacaacgaagccattg

SEQ ID NO: 2197 - DNA, 31 bp, Artificial Sequence
  Description of Artificial Sequence:  Nucleic Acid
tggtcctgggctagctacaacgagtagccat

SEQ ID NO: 2198 - DNA, 31 bp, Artificial Sequence
  Description of Artificial Sequence:  Nucleic Acid
gtccctggggctagctacaacgacctgtgta

SEQ ID NO: 2199 - DNA, 31 bp, Artificial Sequence
  Description of Artificial Sequence:  Nucleic Acid
gcgcactgggctagctacaacgaccctggtc

SEQ ID NO: 2200 - DNA, 31 bp, Artificial Sequence
  Description of Artificial Sequence:  Nucleic Acid
gatgcgcaggctagctacaacgatgtccctg

SEQ ID NO: 2201 - DNA, 31 bp, Artificial Sequence
  Description of Artificial Sequence:  Nucleic Acid
gagatgcgggctagctacaacgaactgtccc

SEQ ID NO: 2202 - DNA, 31 bp, Artificial Sequence
  Description of Artificial Sequence:  Nucleic Acid
gggagatgggctagctacaacgagcactgtc

SEQ ID NO: 2203 - DNA, 31 bp, Artificial Sequence
  Description of Artificial Sequence:  Nucleic Acid
cagggagaggctagctacaacgagcgcactg

SEQ ID NO: 2204 - DNA, 31 bp, Artificial Sequence
  Description of Artificial Sequence:  Nucleic Acid
cttggtgaggctagctacaacgacagggaga

SEQ ID NO: 2205 - DNA, 31 bp, Artificial Sequence
  Description of Artificial Sequence:  Nucleic Acid
gtccttggggctagctacaacgagaccaggg

SEQ ID NO: 2206 - DNA, 31 bp, Artificial Sequence
  Description of Artificial Sequence:  Nucleic Acid
gaggagggggctagctacaacgaccttggtg

SEQ ID NO: 2207 - DNA, 31 bp, Artificial Sequence
  Description of Artificial Sequence:  Nucleic Acid
gaggccggggctagctacaacgagaggaggg

SEQ ID NO: 2208 - DNA, 31 bp, Artificial Sequence
  Description of Artificial Sequence:  Nucleic Acid
gggtgaggggctagctacaacgacggtgagg

SEQ ID NO: 2209 - DNA, 31 bp, Artificial Sequence
  Description of Artificial Sequence:  Nucleic Acid
cgtgggggggctagctacaacgagaggccgg

SEQ ID NO: 2210 - DNA, 31 bp, Artificial Sequence
  Description of Artificial Sequence:  Nucleic Acid
caagctcgggctagctacaacgagggggtga

SEQ ID NO: 2211 - DNA, 31 bp, Artificial Sequence
  Description of Artificial Sequence:  Nucleic Acid
cctacaagggctagctacaacgatcgtgggg

SEQ ID NO: 2212 - DNA, 31 bp, Artificial Sequence
  Description of Artificial Sequence:  Nucleic Acid
ctttcctaggctagctacaacgaaagctcgt

SEQ ID NO: 2213 - DNA, 31 bp, Artificial Sequence
  Description of Artificial Sequence:  Nucleic Acid
cccggcagggctagctacaacgacctttcct

SEQ ID NO: 2214 - DNA, 31 bp, Artificial Sequence
  Description of Artificial Sequence:  Nucleic Acid
catcccggggctagctacaacgaagtccttt

SEQ ID NO: 2215 - DNA, 31 bp, Artificial Sequence
  Description of Artificial Sequence:  Nucleic Acid
agaagccaggctagctacaacgacccggcag

SEQ ID NO: 2216 - DNA, 31 bp, Artificial Sequence
  Description of Artificial Sequence:  Nucleic Acid
catagaagggctagctacaacgacatcccgg

SEQ ID NO: 2217 - DNA, 31 bp, Artificial Sequence
  Description of Artificial Sequence:  Nucleic Acid
cagcctcaggctagctacaacgaagaagcca

SEQ ID NO: 2218 - DNA, 31 bp, Artificial Sequence
  Description of Artificial Sequence:  Nucleic Acid
gagctcagggctagctacaacgactcataga

SEQ ID NO: 2219 - DNA, 31 bp, Artificial Sequence
  Description of Artificial Sequence:  Nucleic Acid
gggcagagggctagctacaacgatcagcctc

SEQ ID NO: 2220 - DNA, 31 bp, Artificial Sequence
  Description of Artificial Sequence:  Nucleic Acid
ggtccgggggctagctacaacgaagagctca

SEQ ID NO: 2221 - DNA, 31 bp, Artificial Sequence
  Description of Artificial Sequence:  Nucleic Acid
tgcagcggggctagctacaacgaccgggcag

SEQ ID NO: 2222 - DNA, 31 bp, Artificial Sequence
  Description of Artificial Sequence:  Nucleic Acid
ggatgcagggctagctacaacgaggtccggg

SEQ ID NO: 2223 - DNA, 31 bp, Artificial Sequence
  Description of Artificial Sequence:  Nucleic Acid
tgtggatgggctagctacaacgaagcggtcc

SEQ ID NO: 2224 - DNA, 31 bp, Artificial Sequence
  Description of Artificial Sequence:  Nucleic Acid
actgtggaggctagctacaacgagcagcggt

SEQ ID NO: 2225 - DNA, 31 bp, Artificial Sequence
  Description of Artificial Sequence:  Nucleic Acid
ggaaactgggctagctacaacgaggatgcag

SEQ ID NO: 2226 - DNA, 31 bp, Artificial Sequence
  Description of Artificial Sequence:  Nucleic Acid
tctggaaaggctagctacaacgatgtggatg

SEQ ID NO: 2227 - DNA, 31 bp, Artificial Sequence
  Description of Artificial Sequence:  Nucleic Acid
ttcccaggggctagctacaacgatctggaaa

SEQ ID NO: 2228 - DNA, 31 bp, Artificial Sequence
  Description of Artificial Sequence:  Nucleic Acid
acactggaggctagctacaacgatcccaggt

SEQ ID NO: 2229 - DNA, 31 bp, Artificial Sequence
  Description of Artificial Sequence:  Nucleic Acid
ttcacacaggctagctacaacgatggattcc

SEQ ID NO: 2230 - DNA, 31 bp, Artificial Sequence
  Description of Artificial Sequence:  Nucleic Acid
tcttcacaggctagctacaacgaactggatt

SEQ ID NO: 2231 - DNA, 31 bp, Artificial Sequence
  Description of Artificial Sequence:  Nucleic Acid
cttcttcaggctagctacaacgaacactgga

SEQ ID NO: 2232 - DNA, 31 bp, Artificial Sequence
  Description of Artificial Sequence:  Nucleic Acid
aggtcccgggctagctacaacgattcttcac

SEQ ID NO: 2233 - DNA, 31 bp, Artificial Sequence
  Description of Artificial Sequence:  Nucleic Acid
gctccaggggctagctacaacgacccgcttc

SEQ ID NO: 2234 - DNA, 31 bp, Artificial Sequence
  Description of Artificial Sequence:  Nucleic Acid
atagcctgggctagctacaacgatccaggtc

SEQ ID NO: 2235 - DNA, 31 bp, Artificial Sequence
  Description of Artificial Sequence:  Nucleic Acid
actgatagggctagctacaacgactgctcca

SEQ ID NO: 2236 - DNA, 31 bp, Artificial Sequence
  Description of Artificial Sequence:  Nucleic Acid
ctgactgaggctagctacaacgaagcctgct

SEQ ID NO: 2237 - DNA, 31 bp, Artificial Sequence
  Description of Artificial Sequence:  Nucleic Acid
tgcgctgaggctagctacaacgatgatagcc

SEQ ID NO: 2238 - DNA, 31 bp, Artificial Sequence
  Description of Artificial Sequence:  Nucleic Acid
tggatgcgggctagctacaacgatgactgat

SEQ ID NO: 2239 - DNA, 31 bp, Artificial Sequence
  Description of Artificial Sequence:  Nucleic Acid
tctggatgggctagctacaacgagctgactg

SEQ ID NO: 2240 - DNA, 31 bp, Artificial Sequence
  Description of Artificial Sequence:  Nucleic Acid
ggtctggaggctagctacaacgagcgctgac

SEQ ID NO: 2241 - DNA, 31 bp, Artificial Sequence
  Description of Artificial Sequence:  Nucleic Acid
gttgttggggctagctacaacgactggatgc

SEQ ID NO: 2242 - DNA, 31 bp, Artificial Sequence
  Description of Artificial Sequence:  Nucleic Acid
ggttgttgggctagctacaacgatggtctgg

SEQ ID NO: 2243 - DNA, 31 bp, Artificial Sequence
  Description of Artificial Sequence:  Nucleic Acid
aggggttgggctagctacaacgatgttggtc

SEQ ID NO: 2244 - DNA, 31 bp, Artificial Sequence
  Description of Artificial Sequence:  Nucleic Acid
ggaaggggggctagctacaacgatgttgttg

SEQ ID NO: 2245 - DNA, 31 bp, Artificial Sequence
  Description of Artificial Sequence:  Nucleic Acid
tataggaaggctagctacaacgattggaagg

SEQ ID NO: 2246 - DNA, 31 bp, Artificial Sequence
  Description of Artificial Sequence:  Nucleic Acid
ctcttctaggctagctacaacgaaggaactt

SEQ ID NO: 2247 - DNA, 31 bp, Artificial Sequence
  Description of Artificial Sequence:  Nucleic Acid
ccacgctgggctagctacaacgatcttctat

SEQ ID NO: 2248 - DNA, 31 bp, Artificial Sequence
  Description of Artificial Sequence:  Nucleic Acid
tccccacgggctagctacaacgatgctcttc

SEQ ID NO: 2249 - DNA, 31 bp, Artificial Sequence
  Description of Artificial Sequence:  Nucleic Acid
agtccccaggctagctacaacgagctgctct

SEQ ID NO: 2250 - DNA, 31 bp, Artificial Sequence
  Description of Artificial Sequence:  Nucleic Acid
ggtcgtagggctagctacaacgaccccacgc

SEQ ID NO: 2251 - DNA, 31 bp, Artificial Sequence
  Description of Artificial Sequence:  Nucleic Acid
tcaggtcgggctagctacaacgaagtcccca

SEQ ID NO: 2252 - DNA, 31 bp, Artificial Sequence
  Description of Artificial Sequence:  Nucleic Acid
cattcaggggctagctacaacgacgtagtcc

SEQ ID NO: 2253 - DNA, 31 bp, Artificial Sequence
  Description of Artificial Sequence:  Nucleic Acid
gcacagcaggctagctacaacgatcaggtcg

SEQ ID NO: 2254 - DNA, 31 bp, Artificial Sequence
  Description of Artificial Sequence:  Nucleic Acid
ccgcacagggctagctacaacgaattcaggt

SEQ ID NO: 2255 - DNA, 31 bp, Artificial Sequence
  Description of Artificial Sequence:  Nucleic Acid
gagccgcaggctagctacaacgaagcattca

SEQ ID NO: 2256 - DNA, 31 bp, Artificial Sequence
  Description of Artificial Sequence:  Nucleic Acid
cagagccgggctagctacaacgaacagcatt

SEQ ID NO: 2257 - DNA, 31 bp, Artificial Sequence
  Description of Artificial Sequence:  Nucleic Acid
aagcagagggctagctacaacgacgcacagc

SEQ ID NO: 2258 - DNA, 31 bp, Artificial Sequence
  Description of Artificial Sequence:  Nucleic Acid
cctggaagggctagctacaacgaagagccgc

SEQ ID NO: 2259 - DNA, 31 bp, Artificial Sequence
  Description of Artificial Sequence:  Nucleic Acid
cactgtcaggctagctacaacgactggaagc

SEQ ID NO: 2260 - DNA, 31 bp, Artificial Sequence
  Description of Artificial Sequence:  Nucleic Acid
ccgcactgggctagctacaacgacacctgga

SEQ ID NO: 2261 - DNA, 31 bp, Artificial Sequence
  Description of Artificial Sequence:  Nucleic Acid
gtcccgcaggctagctacaacgatgtcacct

SEQ ID NO: 2262 - DNA, 31 bp, Artificial Sequence
  Description of Artificial Sequence:  Nucleic Acid
gggtcccgggctagctacaacgaactgtcac

SEQ ID NO: 2263 - DNA, 31 bp, Artificial Sequence
  Description of Artificial Sequence:  Nucleic Acid
ctgatgggggctagctacaacgacccgcact

SEQ ID NO: 2264 - DNA, 31 bp, Artificial Sequence
  Description of Artificial Sequence:  Nucleic Acid
ctgcctgaggctagctacaacgagggtcccg

SEQ ID NO: 2265 - DNA, 31 bp, Artificial Sequence
  Description of Artificial Sequence:  Nucleic Acid
ggggcctgggctagctacaacgactgatggg

SEQ ID NO: 2266 - DNA, 31 bp, Artificial Sequence
  Description of Artificial Sequence:  Nucleic Acid
cggaggggggctagctacaacgactgcctga

SEQ ID NO: 2267 - DNA, 31 bp, Artificial Sequence
  Description of Artificial Sequence:  Nucleic Acid
gcggcaggggctagctacaacgaggaggggc

SEQ ID NO: 2268 - DNA, 31 bp, Artificial Sequence
  Description of Artificial Sequence:  Nucleic Acid
acaggcggggctagctacaacgaaggcggag

SEQ ID NO: 2269 - DNA, 31 bp, Artificial Sequence
  Description of Artificial Sequence:  Nucleic Acid
aggacaggggctagctacaacgaggcaggcg

SEQ ID NO: 2270 - DNA, 31 bp, Artificial Sequence
  Description of Artificial Sequence:  Nucleic Acid
agaaaggaggctagctacaacgaaggcggca

SEQ ID NO: 2271 - DNA, 31 bp, Artificial Sequence
  Description of Artificial Sequence:  Nucleic Acid
agatgggaggctagctacaacgagagaaagg

SEQ ID NO: 2272 - DNA, 31 bp, Artificial Sequence
  Description of Artificial Sequence:  Nucleic Acid
gtcaaagaggctagctacaacgagggatgag

SEQ ID NO: 2273 - DNA, 31 bp, Artificial Sequence
  Description of Artificial Sequence:  Nucleic Acid
cacgattgggctagctacaacgacaaagatg

SEQ ID NO: 2274 - DNA, 31 bp, Artificial Sequence
  Description of Artificial Sequence:  Nucleic Acid
gggcacgaggctagctacaacgatgtcaaag

SEQ ID NO: 2275 - DNA, 31 bp, Artificial Sequence
  Description of Artificial Sequence:  Nucleic Acid
tgggggcaggctagctacaacgagattgtca

SEQ ID NO: 2276 - DNA, 31 bp, Artificial Sequence
  Description of Artificial Sequence:  Nucleic Acid
gttgggggggctagctacaacgaacgattgt

SEQ ID NO: 2277 - DNA, 31 bp, Artificial Sequence
  Description of Artificial Sequence:  Nucleic Acid
cggcagtgggctagctacaacgatgggggca

SEQ ID NO: 2278 - DNA, 31 bp, Artificial Sequence
  Description of Artificial Sequence:  Nucleic Acid
ctcggcagggctagctacaacgagttggggg

SEQ ID NO: 2279 - DNA, 31 bp, Artificial Sequence
  Description of Artificial Sequence:  Nucleic Acid
gagctcggggctagctacaacgaagtgttgg

SEQ ID NO: 2280 - DNA, 31 bp, Artificial Sequence
  Description of Artificial Sequence:  Nucleic Acid
atcttgagggctagctacaacgatcggcagt

SEQ ID NO: 2281 - DNA, 31 bp, Artificial Sequence
  Description of Artificial Sequence:  Nucleic Acid
tcggcagaggctagctacaacgacttgagct

SEQ ID NO: 2282 - DNA, 31 bp, Artificial Sequence
  Description of Artificial Sequence:  Nucleic Acid
tcactcggggctagctacaacgaagatcttg

SEQ ID NO: 2283 - DNA, 31 bp, Artificial Sequence
  Description of Artificial Sequence:  Nucleic Acid
tcggttcaggctagctacaacgatcggcaga

SEQ ID NO: 2284 - DNA, 31 bp, Artificial Sequence
  Description of Artificial Sequence:  Nucleic Acid
agtttcggggctagctacaacgatcactcgg

SEQ ID NO: 2285 - DNA, 31 bp, Artificial Sequence
  Description of Artificial Sequence:  Nucleic Acid
tgccagagggctagctacaacgattcggttc

SEQ ID NO: 2286 - DNA, 31 bp, Artificial Sequence
  Description of Artificial Sequence:  Nucleic Acid
ggcagctgggctagctacaacgacagagttt

SEQ ID NO: 2287 - DNA, 31 bp, Artificial Sequence
  Description of Artificial Sequence:  Nucleic Acid
cgaggcagggctagctacaacgatgccagag

SEQ ID NO: 2288 - DNA, 31 bp, Artificial Sequence
  Description of Artificial Sequence:  Nucleic Acid
caccgaggggctagctacaacgaagctgcca

SEQ ID NO: 2289 - DNA, 31 bp, Artificial Sequence
  Description of Artificial Sequence:  Nucleic Acid
catccccaggctagctacaacgacgaggcag

SEQ ID NO: 2290 - DNA, 31 bp, Artificial Sequence
  Description of Artificial Sequence:  Nucleic Acid
agatctcaggctagctacaacgaccccaccg

SEQ ID NO: 2291 - DNA, 31 bp, Artificial Sequence
  Description of Artificial Sequence:  Nucleic Acid
taggaagaggctagctacaacgactcatccc

SEQ ID NO: 2292 - DNA, 31 bp, Artificial Sequence
  Description of Artificial Sequence:  Nucleic Acid
tcacacagggctagctacaacgaaggaagat

SEQ ID NO: 2293 - DNA, 31 bp, Artificial Sequence
  Description of Artificial Sequence:  Nucleic Acid
ttgtcacaggctagctacaacgaagtaggaa

SEQ ID NO: 2294 - DNA, 31 bp, Artificial Sequence
  Description of Artificial Sequence:  Nucleic Acid
ccttgtcaggctagctacaacgaacagtagg

SEQ ID NO: 2295 - DNA, 31 bp, Artificial Sequence
  Description of Artificial Sequence:  Nucleic Acid
gcaccttgggctagctacaacgacacacagt

SEQ ID NO: 2296 - DNA, 31 bp, Artificial Sequence
  Description of Artificial Sequence:  Nucleic Acid
tttctgcaggctagctacaacgacttgtcac

SEQ ID NO: 2297 - DNA, 31 bp, Artificial Sequence
  Description of Artificial Sequence:  Nucleic Acid
tctttctgggctagctacaacgaaccttgtc

SEQ ID NO: 2298 - DNA, 31 bp, Artificial Sequence
  Description of Artificial Sequence:  Nucleic Acid
cctcaatgggctagctacaacgacctctttc

SEQ ID NO: 2299 - DNA, 31 bp, Artificial Sequence
  Description of Artificial Sequence:  Nucleic Acid
cacctcaaggctagctacaacgagtcctctt

SEQ ID NO: 2300 - DNA, 31 bp, Artificial Sequence
  Description of Artificial Sequence:  Nucleic Acid
gaaatacaggctagctacaacgactcaatgt

SEQ ID NO: 2301 - DNA, 31 bp, Artificial Sequence
  Description of Artificial Sequence:  Nucleic Acid
gtgaaataggctagctacaacgaacctcaat

SEQ ID NO: 2302 - DNA, 31 bp, Artificial Sequence
  Description of Artificial Sequence:  Nucleic Acid
ccgtgaaaggctagctacaacgaacacctca

SEQ ID NO: 2303 - DNA, 31 bp, Artificial Sequence
  Description of Artificial Sequence:  Nucleic Acid
tggtcccgggctagctacaacgagaaataca

SEQ ID NO: 2304 - DNA, 31 bp, Artificial Sequence
  Description of Artificial Sequence:  Nucleic Acid
cagcctggggctagctacaacgacccgtgaa

SEQ ID NO: 2305 - DNA, 31 bp, Artificial Sequence
  Description of Artificial Sequence:  Nucleic Acid
cctcccagggctagctacaacgactggtccc

SEQ ID NO: 2306 - DNA, 31 bp, Artificial Sequence
  Description of Artificial Sequence:  Nucleic Acid
gcctcgggggctagctacaacgactcccagc

SEQ ID NO: 2307 - DNA, 31 bp, Artificial Sequence
  Description of Artificial Sequence:  Nucleic Acid
aaaaggagggctagctacaacgactcgggcc

SEQ ID NO: 2308 - DNA, 31 bp, Artificial Sequence
  Description of Artificial Sequence:  Nucleic Acid
tcagcttgggctagctacaacgagaaaagga

SEQ ID NO: 2309 - DNA, 31 bp, Artificial Sequence
  Description of Artificial Sequence:  Nucleic Acid
cacatcagggctagctacaacgattgcgaaa

SEQ ID NO: 2310 - DNA, 31 bp, Artificial Sequence
  Description of Artificial Sequence:  Nucleic Acid
ggtgcacaggctagctacaacgacagcttgc

SEQ ID NO: 2311 - DNA, 31 bp, Artificial Sequence
  Description of Artificial Sequence:  Nucleic Acid
tcggtgcaggctagctacaacgaatcagctt

SEQ ID NO: 2312 - DNA, 31 bp, Artificial Sequence
  Description of Artificial Sequence:  Nucleic Acid
tgtcggtgggctagctacaacgaacatcagc

SEQ ID NO: 2313 - DNA, 31 bp, Artificial Sequence
  Description of Artificial Sequence:  Nucleic Acid
cttgtcggggctagctacaacgagcacatca

SEQ ID NO: 2314 - DNA, 31 bp, Artificial Sequence
  Description of Artificial Sequence:  Nucleic Acid
gccacttgggctagctacaacgacggtgcac

SEQ ID NO: 2315 - DNA, 31 bp, Artificial Sequence
  Description of Artificial Sequence:  Nucleic Acid
aatggccaggctagctacaacgattgtcggt

SEQ ID NO: 2316 - DNA, 31 bp, Artificial Sequence
  Description of Artificial Sequence:  Nucleic Acid
cacaatggggctagctacaacgacacttgtc

SEQ ID NO: 2317 - DNA, 31 bp, Artificial Sequence
  Description of Artificial Sequence:  Nucleic Acid
gaacacaaggctagctacaacgaggccactt

SEQ ID NO: 2318 - DNA, 31 bp, Artificial Sequence
  Description of Artificial Sequence:  Nucleic Acid
ccggaacaggctagctacaacgaaatggcca

SEQ ID NO: 2319 - DNA, 31 bp, Artificial Sequence
  Description of Artificial Sequence:  Nucleic Acid
gtccggaaggctagctacaacgaacaatggc

SEQ ID NO: 2320 - DNA, 31 bp, Artificial Sequence
  Description of Artificial Sequence:  Nucleic Acid
gggaggggggctagctacaacgaccggaaca

SEQ ID NO: 2321 - DNA, 31 bp, Artificial Sequence
  Description of Artificial Sequence:  Nucleic Acid
ggtctgcgggctagctacaacgaagggaggg

SEQ ID NO: 2322 - DNA, 31 bp, Artificial Sequence
  Description of Artificial Sequence:  Nucleic Acid
ggggtctgggctagctacaacgagtagggag

SEQ ID NO: 2323 - DNA, 31 bp, Artificial Sequence
  Description of Artificial Sequence:  Nucleic Acid
ggctggggggctagctacaacgactgcgtag

SEQ ID NO: 2324 - DNA, 31 bp, Artificial Sequence
  Description of Artificial Sequence:  Nucleic Acid
cctgcaggggctagctacaacgatggggtct

SEQ ID NO: 2325 - DNA, 31 bp, Artificial Sequence
  Description of Artificial Sequence:  Nucleic Acid
ggagcctgggctagctacaacgaaggctggg

SEQ ID NO: 2326 - DNA, 31 bp, Artificial Sequence
  Description of Artificial Sequence:  Nucleic Acid
cacaggagggctagctacaacgactgcaggc

SEQ ID NO: 2327 - DNA, 31 bp, Artificial Sequence
  Description of Artificial Sequence:  Nucleic Acid
gacacgcaggctagctacaacgaaggagcct

SEQ ID NO: 2328 - DNA, 31 bp, Artificial Sequence
  Description of Artificial Sequence:  Nucleic Acid
gagacacgggctagctacaacgaacaggagc

SEQ ID NO: 2329 - DNA, 31 bp, Artificial Sequence
  Description of Artificial Sequence:  Nucleic Acid
tggagacaggctagctacaacgagcacagga

SEQ ID NO: 2330 - DNA, 31 bp, Artificial Sequence
  Description of Artificial Sequence:  Nucleic Acid
catggagaggctagctacaacgaacgcacag

SEQ ID NO: 2331 - DNA, 31 bp, Artificial Sequence
  Description of Artificial Sequence:  Nucleic Acid
cagctgcaggctagctacaacgaggagacac

SEQ ID NO: 2332 - DNA, 31 bp, Artificial Sequence
  Description of Artificial Sequence:  Nucleic Acid
cgcagctgggctagctacaacgaatggagac

SEQ ID NO: 2333 - DNA, 31 bp, Artificial Sequence
  Description of Artificial Sequence:  Nucleic Acid
cgccgcagggctagctacaacgatgcatgga

SEQ ID NO: 2334 - DNA, 31 bp, Artificial Sequence
  Description of Artificial Sequence:  Nucleic Acid
ggccgccgggctagctacaacgaagctgcat

SEQ ID NO: 2335 - DNA, 31 bp, Artificial Sequence
  Description of Artificial Sequence:  Nucleic Acid
gaaggccgggctagctacaacgacgcagctg

SEQ ID NO: 2336 - DNA, 31 bp, Artificial Sequence
  Description of Artificial Sequence:  Nucleic Acid
tcggaaggggctagctacaacgacgccgcag

SEQ ID NO: 2337 - DNA, 31 bp, Artificial Sequence
  Description of Artificial Sequence:  Nucleic Acid
gctcccggggctagctacaacgacggaaggc

SEQ ID NO: 2338 - DNA, 31 bp, Artificial Sequence
  Description of Artificial Sequence:  Nucleic Acid
tcactgagggctagctacaacgatcccggtc

SEQ ID NO: 2339 - DNA, 31 bp, Artificial Sequence
  Description of Artificial Sequence:  Nucleic Acid
tgggctcaggctagctacaacgatgagctcc

SEQ ID NO: 2340 - DNA, 31 bp, Artificial Sequence
  Description of Artificial Sequence:  Nucleic Acid
tccatgggggctagctacaacgatcactgag

SEQ ID NO: 2341 - DNA, 31 bp, Artificial Sequence
  Description of Artificial Sequence:  Nucleic Acid
gaattccaggctagctacaacgagggctcac

SEQ ID NO: 2342 - DNA, 31 bp, Artificial Sequence
  Description of Artificial Sequence:  Nucleic Acid
tactggaaggctagctacaacgatccatggg

SEQ ID NO: 2343 - DNA, 31 bp, Artificial Sequence
  Description of Artificial Sequence:  Nucleic Acid
ggcaggtaggctagctacaacgatggaattc

SEQ ID NO: 2344 - DNA, 31 bp, Artificial Sequence
  Description of Artificial Sequence:  Nucleic Acid
ctggcaggggctagctacaacgaactggaat

SEQ ID NO: 2345 - DNA, 31 bp, Artificial Sequence
  Description of Artificial Sequence:  Nucleic Acid
gtatctggggctagctacaacgaaggtactg

SEQ ID NO: 2346 - DNA, 31 bp, Artificial Sequence
  Description of Artificial Sequence:  Nucleic Acid
cgtctgtaggctagctacaacgactggcagg

SEQ ID NO: 2347 - DNA, 31 bp, Artificial Sequence
  Description of Artificial Sequence:  Nucleic Acid
atcgtctgggctagctacaacgaatctggca

SEQ ID NO: 2348 - DNA, 31 bp, Artificial Sequence
  Description of Artificial Sequence:  Nucleic Acid
gacgatcgggctagctacaacgactgtatct

SEQ ID NO: 2349 - DNA, 31 bp, Artificial Sequence
  Description of Artificial Sequence:  Nucleic Acid
ggtgacgaggctagctacaacgacgtctgta

SEQ ID NO: 2350 - DNA, 31 bp, Artificial Sequence
  Description of Artificial Sequence:  Nucleic Acid
tccggtgaggctagctacaacgagatcgtct

SEQ ID NO: 2351 - DNA, 31 bp, Artificial Sequence
  Description of Artificial Sequence:  Nucleic Acid
caatccggggctagctacaacgagacgatcg

SEQ ID NO: 2352 - DNA, 31 bp, Artificial Sequence
  Description of Artificial Sequence:  Nucleic Acid
ctcctcaaggctagctacaacgaccggtgac

SEQ ID NO: 2353 - DNA, 31 bp, Artificial Sequence
  Description of Artificial Sequence:  Nucleic Acid
cttttacgggctagctacaacgattctcctc

SEQ ID NO: 2354 - DNA, 31 bp, Artificial Sequence
  Description of Artificial Sequence:  Nucleic Acid
tccttttaggctagctacaacgagtttctcc

SEQ ID NO: 2355 - DNA, 31 bp, Artificial Sequence
  Description of Artificial Sequence:  Nucleic Acid
ctcatatgggctagctacaacgaccttttac

SEQ ID NO: 2356 - DNA, 31 bp, Artificial Sequence
  Description of Artificial Sequence:  Nucleic Acid
gtctcataggctagctacaacgagtcctttt

SEQ ID NO: 2357 - DNA, 31 bp, Artificial Sequence
  Description of Artificial Sequence:  Nucleic Acid
aggtctcaggctagctacaacgaatgtcctt

SEQ ID NO: 2358 - DNA, 31 bp, Artificial Sequence
  Description of Artificial Sequence:  Nucleic Acid
cttgaaggggctagctacaacgactcatatg

SEQ ID NO: 2359 - DNA, 31 bp, Artificial Sequence
  Description of Artificial Sequence:  Nucleic Acid
tcatgatgggctagctacaacgatcttgaag

SEQ ID NO: 2360 - DNA, 31 bp, Artificial Sequence
  Description of Artificial Sequence:  Nucleic Acid
cttcatgaggctagctacaacgagctcttga

SEQ ID NO: 2361 - DNA, 31 bp, Artificial Sequence
  Description of Artificial Sequence:  Nucleic Acid
cttcttcaggctagctacaacgagatgctct

SEQ ID NO: 2362 - DNA, 31 bp, Artificial Sequence
  Description of Artificial Sequence:  Nucleic Acid
tgaaaggaggctagctacaacgatcttcttc

SEQ ID NO: 2363 - DNA, 31 bp, Artificial Sequence
  Description of Artificial Sequence:  Nucleic Acid
tgggtccgggctagctacaacgatgaaagga

SEQ ID NO: 2364 - DNA, 31 bp, Artificial Sequence
  Description of Artificial Sequence:  Nucleic Acid
tcggtgggggctagctacaacgaccgctgaa

SEQ ID NO: 2365 - DNA, 31 bp, Artificial Sequence
  Description of Artificial Sequence:  Nucleic Acid
ggggtcggggctagctacaacgagggtccgc

SEQ ID NO: 2366 - DNA, 31 bp, Artificial Sequence
  Description of Artificial Sequence:  Nucleic Acid
gccgggggggctagctacaacgacggtgggt

SEQ ID NO: 2367 - DNA, 31 bp, Artificial Sequence
  Description of Artificial Sequence:  Nucleic Acid
ggtggaggggctagctacaacgacgggggtc

SEQ ID NO: 2368 - DNA, 31 bp, Artificial Sequence
  Description of Artificial Sequence:  Nucleic Acid
cgtcgaggggctagctacaacgaggaggccg

SEQ ID NO: 2369 - DNA, 31 bp, Artificial Sequence
  Description of Artificial Sequence:  Nucleic Acid
gcaatgcgggctagctacaacgacgaggtgg

SEQ ID NO: 2370 - DNA, 31 bp, Artificial Sequence
  Description of Artificial Sequence:  Nucleic Acid
cagcaatgggctagctacaacgagtcgaggt

SEQ ID NO: 2371 - DNA, 31 bp, Artificial Sequence
  Description of Artificial Sequence:  Nucleic Acid
cacagcaaggctagctacaacgagcgtcgag

SEQ ID NO: 2372 - DNA, 31 bp, Artificial Sequence
  Description of Artificial Sequence:  Nucleic Acid
aggcacagggctagctacaacgaaatgcgtc

SEQ ID NO: 2373 - DNA, 31 bp, Artificial Sequence
  Description of Artificial Sequence:  Nucleic Acid
ggaaggcaggctagctacaacgaagcaatgc

SEQ ID NO: 2374 - DNA, 31 bp, Artificial Sequence
  Description of Artificial Sequence:  Nucleic Acid
cgggaaggggctagctacaacgaacagcaat

SEQ ID NO: 2375 - DNA, 31 bp, Artificial Sequence
  Description of Artificial Sequence:  Nucleic Acid
ctgagctgggctagctacaacgagggaaggc

SEQ ID NO: 2376 - DNA, 31 bp, Artificial Sequence
  Description of Artificial Sequence:  Nucleic Acid
aagctgagggctagctacaacgatgcgggaa

SEQ ID NO: 2377 - DNA, 31 bp, Artificial Sequence
  Description of Artificial Sequence:  Nucleic Acid
gacagaagggctagctacaacgatgagctgc

SEQ ID NO: 2378 - DNA, 31 bp, Artificial Sequence
  Description of Artificial Sequence:  Nucleic Acid
cttggggaggctagctacaacgaagaagctg

SEQ ID NO: 2379 - DNA, 31 bp, Artificial Sequence
  Description of Artificial Sequence:  Nucleic Acid
ggtgctggggctagctacaacgattggggac

SEQ ID NO: 2380 - DNA, 31 bp, Artificial Sequence
  Description of Artificial Sequence:  Nucleic Acid
ctggggtgggctagctacaacgatggcttgg

SEQ ID NO: 2381 - DNA, 31 bp, Artificial Sequence
  Description of Artificial Sequence:  Nucleic Acid
ggctggggggctagctacaacgagctggctt

SEQ ID NO: 2382 - DNA, 31 bp, Artificial Sequence
  Description of Artificial Sequence:  Nucleic Acid
ggatagggggctagctacaacgatggggtgc

SEQ ID NO: 2383 - DNA, 31 bp, Artificial Sequence
  Description of Artificial Sequence:  Nucleic Acid
taaagggaggctagctacaacgaagggctgg

SEQ ID NO: 2384 - DNA, 31 bp, Artificial Sequence
  Description of Artificial Sequence:  Nucleic Acid
ggatgacgggctagctacaacgaaaagggat

SEQ ID NO: 2385 - DNA, 31 bp, Artificial Sequence
  Description of Artificial Sequence:  Nucleic Acid
agggatgaggctagctacaacgagtaaaggg

SEQ ID NO: 2386 - DNA, 31 bp, Artificial Sequence
  Description of Artificial Sequence:  Nucleic Acid
ctcagggaggctagctacaacgagacgtaaa

SEQ ID NO: 2387 - DNA, 31 bp, Artificial Sequence
  Description of Artificial Sequence:  Nucleic Acid
tgatggtgggctagctacaacgatcagggat

SEQ ID NO: 2388 - DNA, 31 bp, Artificial Sequence
  Description of Artificial Sequence:  Nucleic Acid
gttgatggggctagctacaacgagctcaggg

SEQ ID NO: 2389 - DNA, 31 bp, Artificial Sequence
  Description of Artificial Sequence:  Nucleic Acid
atagttgaggctagctacaacgaggtgctca

SEQ ID NO: 2390 - DNA, 31 bp, Artificial Sequence
  Description of Artificial Sequence:  Nucleic Acid
catcatagggctagctacaacgatgatggtg

SEQ ID NO: 2391 - DNA, 31 bp, Artificial Sequence
  Description of Artificial Sequence:  Nucleic Acid
actcatcaggctagctacaacgaagttgatg

SEQ ID NO: 2392 - DNA, 31 bp, Artificial Sequence
  Description of Artificial Sequence:  Nucleic Acid
gaaactcaggctagctacaacgacatagttg

SEQ ID NO: 2393 - DNA, 31 bp, Artificial Sequence
  Description of Artificial Sequence:  Nucleic Acid
gtgggaaaggctagctacaacgatcatcata

SEQ ID NO: 2394 - DNA, 31 bp, Artificial Sequence
  Description of Artificial Sequence:  Nucleic Acid
caccatggggctagctacaacgagggaaact

SEQ ID NO: 2395 - DNA, 31 bp, Artificial Sequence
  Description of Artificial Sequence:  Nucleic Acid
aaacaccaggctagctacaacgaggtgggaa

SEQ ID NO: 2396 - DNA, 31 bp, Artificial Sequence
  Description of Artificial Sequence:  Nucleic Acid
aggaaacaggctagctacaacgacatggtgg

SEQ ID NO: 2397 - DNA, 31 bp, Artificial Sequence
  Description of Artificial Sequence:  Nucleic Acid
gaaggaaaggctagctacaacgaaccatggt

SEQ ID NO: 2398 - DNA, 31 bp, Artificial Sequence
  Description of Artificial Sequence:  Nucleic Acid
ctgatctgggctagctacaacgaccagaagg

SEQ ID NO: 2399 - DNA, 31 bp, Artificial Sequence
  Description of Artificial Sequence:  Nucleic Acid
ctggctgaggctagctacaacgactgcccag

SEQ ID NO: 2400 - DNA, 31 bp, Artificial Sequence
  Description of Artificial Sequence:  Nucleic Acid
aggcctggggctagctacaacgatgatctgc

SEQ ID NO: 2401 - DNA, 31 bp, Artificial Sequence
  Description of Artificial Sequence:  Nucleic Acid
ggccgaggggctagctacaacgactggctga

SEQ ID NO: 2402 - DNA, 31 bp, Artificial Sequence
  Description of Artificial Sequence:  Nucleic Acid
ggccaaggggctagctacaacgacgaggcct

SEQ ID NO: 2403 - DNA, 31 bp, Artificial Sequence
  Description of Artificial Sequence:  Nucleic Acid
ggccggggggctagctacaacgacaaggccg

SEQ ID NO: 2404 - DNA, 31 bp, Artificial Sequence
  Description of Artificial Sequence:  Nucleic Acid
gggaggggggctagctacaacgacggggcca

SEQ ID NO: 2405 - DNA, 31 bp, Artificial Sequence
  Description of Artificial Sequence:  Nucleic Acid
gggcaggaggctagctacaacgattggggag

SEQ ID NO: 2406 - DNA, 31 bp, Artificial Sequence
  Description of Artificial Sequence:  Nucleic Acid
gcctggggggctagctacaacgaaggacttg

SEQ ID NO: 2407 - DNA, 31 bp, Artificial Sequence
  Description of Artificial Sequence:  Nucleic Acid
ggctggagggctagctacaacgactggggca

SEQ ID NO: 2408 - DNA, 31 bp, Artificial Sequence
  Description of Artificial Sequence:  Nucleic Acid
ggcaggggggctagctacaacgatggagcct

SEQ ID NO: 2409 - DNA, 31 bp, Artificial Sequence
  Description of Artificial Sequence:  Nucleic Acid
agcaggggggctagctacaacgaaggggctg

SEQ ID NO: 2410 - DNA, 31 bp, Artificial Sequence
  Description of Artificial Sequence:  Nucleic Acid
ggctggagggctagctacaacgaaggggcag

SEQ ID NO: 2411 - DNA, 31 bp, Artificial Sequence
  Description of Artificial Sequence:  Nucleic Acid
taccatggggctagctacaacgatggagcag

SEQ ID NO: 2412 - DNA, 31 bp, Artificial Sequence
  Description of Artificial Sequence:  Nucleic Acid
tgataccaggctagctacaacgaggctggag

SEQ ID NO: 2413 - DNA, 31 bp, Artificial Sequence
  Description of Artificial Sequence:  Nucleic Acid
agctgataggctagctacaacgacatggctg

SEQ ID NO: 2414 - DNA, 31 bp, Artificial Sequence
  Description of Artificial Sequence:  Nucleic Acid
agagctgaggctagctacaacgaaccatggc

SEQ ID NO: 2415 - DNA, 31 bp, Artificial Sequence
  Description of Artificial Sequence:  Nucleic Acid
ggccagagggctagctacaacgatgatacca

SEQ ID NO: 2416 - DNA, 31 bp, Artificial Sequence
  Description of Artificial Sequence:  Nucleic Acid
ggcctgggggctagctacaacgacagagctg

SEQ ID NO: 2417 - DNA, 31 bp, Artificial Sequence
  Description of Artificial Sequence:  Nucleic Acid
ggctggggggctagctacaacgactgggcca

SEQ ID NO: 2418 - DNA, 31 bp, Artificial Sequence
  Description of Artificial Sequence:  Nucleic Acid
gacaggggggctagctacaacgatggggcct

SEQ ID NO: 2419 - DNA, 31 bp, Artificial Sequence
  Description of Artificial Sequence:  Nucleic Acid
gactgggaggctagctacaacgaaggggctg

SEQ ID NO: 2420 - DNA, 31 bp, Artificial Sequence
  Description of Artificial Sequence:  Nucleic Acid
ggctaggaggctagctacaacgatgggacag

SEQ ID NO: 2421 - DNA, 31 bp, Artificial Sequence
  Description of Artificial Sequence:  Nucleic Acid
gcctggggggctagctacaacgataggactg

SEQ ID NO: 2422 - DNA, 31 bp, Artificial Sequence
  Description of Artificial Sequence:  Nucleic Acid
gaggagggggctagctacaacgactggggct

SEQ ID NO: 2423 - DNA, 31 bp, Artificial Sequence
  Description of Artificial Sequence:  Nucleic Acid
ggccacagggctagctacaacgactgaggag

SEQ ID NO: 2424 - DNA, 31 bp, Artificial Sequence
  Description of Artificial Sequence:  Nucleic Acid
tggggccaggctagctacaacgaagcctgag

SEQ ID NO: 2425 - DNA, 31 bp, Artificial Sequence
  Description of Artificial Sequence:  Nucleic Acid
aggtggggggctagctacaacgacacagcct

SEQ ID NO: 2426 - DNA, 31 bp, Artificial Sequence
  Description of Artificial Sequence:  Nucleic Acid
ggggcaggggctagctacaacgaggggccac

SEQ ID NO: 2427 - DNA, 31 bp, Artificial Sequence
  Description of Artificial Sequence:  Nucleic Acid
cttgggggggctagctacaacgaaggtgggg

SEQ ID NO: 2428 - DNA, 31 bp, Artificial Sequence
  Description of Artificial Sequence:  Nucleic Acid
tgggtgggggctagctacaacgattgggggc

SEQ ID NO: 2429 - DNA, 31 bp, Artificial Sequence
  Description of Artificial Sequence:  Nucleic Acid
agcctgggggctagctacaacgagggcttgg

SEQ ID NO: 2430 - DNA, 31 bp, Artificial Sequence
  Description of Artificial Sequence:  Nucleic Acid
ttccccagggctagctacaacgactgggtgg

SEQ ID NO: 2431 - DNA, 31 bp, Artificial Sequence
  Description of Artificial Sequence:  Nucleic Acid
tgacagcgggctagctacaacgatccttccc

SEQ ID NO: 2432 - DNA, 31 bp, Artificial Sequence
  Description of Artificial Sequence:  Nucleic Acid
tctgacagggctagctacaacgagttccttc

SEQ ID NO: 2433 - DNA, 31 bp, Artificial Sequence
  Description of Artificial Sequence:  Nucleic Acid
gcctctgaggctagctacaacgaagcgttcc

SEQ ID NO: 2434 - DNA, 31 bp, Artificial Sequence
  Description of Artificial Sequence:  Nucleic Acid
cagcagggggctagctacaacgactctgaca

SEQ ID NO: 2435 - DNA, 31 bp, Artificial Sequence
  Description of Artificial Sequence:  Nucleic Acid
agctgcagggctagctacaacgaagggcctc

SEQ ID NO: 2436 - DNA, 31 bp, Artificial Sequence
  Description of Artificial Sequence:  Nucleic Acid
tgcagctgggctagctacaacgaagcagggc

SEQ ID NO: 2437 - DNA, 31 bp, Artificial Sequence
  Description of Artificial Sequence:  Nucleic Acid
aactgcagggctagctacaacgatgcagcag

SEQ ID NO: 2438 - DNA, 31 bp, Artificial Sequence
  Description of Artificial Sequence:  Nucleic Acid
tcaaactgggctagctacaacgaagctgcag

SEQ ID NO: 2439 - DNA, 31 bp, Artificial Sequence
  Description of Artificial Sequence:  Nucleic Acid
tcatcaaaggctagctacaacgatgcagctg

SEQ ID NO: 2440 - DNA, 31 bp, Artificial Sequence
  Description of Artificial Sequence:  Nucleic Acid
cttcatcaggctagctacaacgacaaactgc

SEQ ID NO: 2441 - DNA, 31 bp, Artificial Sequence
  Description of Artificial Sequence:  Nucleic Acid
ggtcttcaggctagctacaacgacatcaaac

SEQ ID NO: 2442 - DNA, 31 bp, Artificial Sequence
  Description of Artificial Sequence:  Nucleic Acid
cccccaggggctagctacaacgacttcatca

SEQ ID NO: 2443 - DNA, 31 bp, Artificial Sequence
  Description of Artificial Sequence:  Nucleic Acid
aagcaaggggctagctacaacgaccccaggt

SEQ ID NO: 2444 - DNA, 31 bp, Artificial Sequence
  Description of Artificial Sequence:  Nucleic Acid
ttgccaagggctagctacaacgaaaggcccc

SEQ ID NO: 2445 - DNA, 31 bp, Artificial Sequence
  Description of Artificial Sequence:  Nucleic Acid
tgctgttgggctagctacaacgacaagcaag

SEQ ID NO: 2446 - DNA, 31 bp, Artificial Sequence
  Description of Artificial Sequence:  Nucleic Acid
ctgtgctgggctagctacaacgatgccaagc

SEQ ID NO: 2447 - DNA, 31 bp, Artificial Sequence
  Description of Artificial Sequence:  Nucleic Acid
ggtctgtgggctagctacaacgatgttgcca

SEQ ID NO: 2448 - DNA, 31 bp, Artificial Sequence
  Description of Artificial Sequence:  Nucleic Acid
tgggtctgggctagctacaacgagctgttgc

SEQ ID NO: 2449 - DNA, 31 bp, Artificial Sequence
  Description of Artificial Sequence:  Nucleic Acid
cagctgggggctagctacaacgactgtgctg

SEQ ID NO: 2450 - DNA, 31 bp, Artificial Sequence
  Description of Artificial Sequence:  Nucleic Acid
gaacacagggctagctacaacgatgggtctg

SEQ ID NO: 2451 - DNA, 31 bp, Artificial Sequence
  Description of Artificial Sequence:  Nucleic Acid
tgtgaacaggctagctacaacgaagctgggt

SEQ ID NO: 2452 - DNA, 31 bp, Artificial Sequence
  Description of Artificial Sequence:  Nucleic Acid
tctgtgaaggctagctacaacgaacagctgg

SEQ ID NO: 2453 - DNA, 31 bp, Artificial Sequence
  Description of Artificial Sequence:  Nucleic Acid
caggtctgggctagctacaacgagaacacag

SEQ ID NO: 2454 - DNA, 31 bp, Artificial Sequence
  Description of Artificial Sequence:  Nucleic Acid
atgccaggggctagctacaacgactgtgaac

SEQ ID NO: 2455 - DNA, 31 bp, Artificial Sequence
  Description of Artificial Sequence:  Nucleic Acid
gacggatgggctagctacaacgacaggtctg

SEQ ID NO: 2456 - DNA, 31 bp, Artificial Sequence
  Description of Artificial Sequence:  Nucleic Acid
tcgacggaggctagctacaacgagccaggtc

SEQ ID NO: 2457 - DNA, 31 bp, Artificial Sequence
  Description of Artificial Sequence:  Nucleic Acid
gttgtcgaggctagctacaacgaggatgcca

SEQ ID NO: 2458 - DNA, 31 bp, Artificial Sequence
  Description of Artificial Sequence:  Nucleic Acid
cggagttgggctagctacaacgacgacggat

SEQ ID NO: 2459 - DNA, 31 bp, Artificial Sequence
  Description of Artificial Sequence:  Nucleic Acid
actcggagggctagctacaacgatgtcgacg

SEQ ID NO: 2460 - DNA, 31 bp, Artificial Sequence
  Description of Artificial Sequence:  Nucleic Acid
tgctgaaaggctagctacaacgatcggagtt

SEQ ID NO: 2461 - DNA, 31 bp, Artificial Sequence
  Description of Artificial Sequence:  Nucleic Acid
agcagctgggctagctacaacgatgaaactc

SEQ ID NO: 2462 - DNA, 31 bp, Artificial Sequence
  Description of Artificial Sequence:  Nucleic Acid
ttcagcagggctagctacaacgatgctgaaa

SEQ ID NO: 2463 - DNA, 31 bp, Artificial Sequence
  Description of Artificial Sequence:  Nucleic Acid
tggttcagggctagctacaacgaagctgctg

SEQ ID NO: 2464 - DNA, 31 bp, Artificial Sequence
  Description of Artificial Sequence:  Nucleic Acid
tgccctggggctagctacaacgatcagcagc

SEQ ID NO: 2465 - DNA, 31 bp, Artificial Sequence
  Description of Artificial Sequence:  Nucleic Acid
caggtatgggctagctacaacgacctggttc

SEQ ID NO: 2466 - DNA, 31 bp, Artificial Sequence
  Description of Artificial Sequence:  Nucleic Acid
cacaggtaggctagctacaacgagccctggt

SEQ ID NO: 2467 - DNA, 31 bp, Artificial Sequence
  Description of Artificial Sequence:  Nucleic Acid
gccacaggggctagctacaacgaatgccctg

SEQ ID NO: 2468 - DNA, 31 bp, Artificial Sequence
  Description of Artificial Sequence:  Nucleic Acid
gggggccaggctagctacaacgaaggtatgc

SEQ ID NO: 2469 - DNA, 31 bp, Artificial Sequence
  Description of Artificial Sequence:  Nucleic Acid
gtggggggggctagctacaacgacacaggta

SEQ ID NO: 2470 - DNA, 31 bp, Artificial Sequence
  Description of Artificial Sequence:  Nucleic Acid
cagttgtgggctagctacaacgaggggggcc

SEQ ID NO: 2471 - DNA, 31 bp, Artificial Sequence
  Description of Artificial Sequence:  Nucleic Acid
ctcagttgggctagctacaacgagtgggggg

SEQ ID NO: 2472 - DNA, 31 bp, Artificial Sequence
  Description of Artificial Sequence:  Nucleic Acid
gggctcagggctagctacaacgatgtgtggg

SEQ ID NO: 2473 - DNA, 31 bp, Artificial Sequence
  Description of Artificial Sequence:  Nucleic Acid
agcatgggggctagctacaacgatcagttgt

SEQ ID NO: 2474 - DNA, 31 bp, Artificial Sequence
  Description of Artificial Sequence:  Nucleic Acid
catcagcaggctagctacaacgagggctcag

SEQ ID NO: 2475 - DNA, 31 bp, Artificial Sequence
  Description of Artificial Sequence:  Nucleic Acid
tccatcagggctagctacaacgaatgggctc

SEQ ID NO: 2476 - DNA, 31 bp, Artificial Sequence
  Description of Artificial Sequence:  Nucleic Acid
gtactccaggctagctacaacgacagcatgg

SEQ ID NO: 2477 - DNA, 31 bp, Artificial Sequence
  Description of Artificial Sequence:  Nucleic Acid
tcagggtaggctagctacaacgatccatcag

SEQ ID NO: 2478 - DNA, 31 bp, Artificial Sequence
  Description of Artificial Sequence:  Nucleic Acid
cctcagggggctagctacaacgaactccatc

SEQ ID NO: 2479 - DNA, 31 bp, Artificial Sequence
  Description of Artificial Sequence:  Nucleic Acid
agttatagggctagctacaacgactcagggt

SEQ ID NO: 2480 - DNA, 31 bp, Artificial Sequence
  Description of Artificial Sequence:  Nucleic Acid
gcgagttaggctagctacaacgaagcctcag

SEQ ID NO: 2481 - DNA, 31 bp, Artificial Sequence
  Description of Artificial Sequence:  Nucleic Acid
taggcgagggctagctacaacgatatagcct

SEQ ID NO: 2482 - DNA, 31 bp, Artificial Sequence
  Description of Artificial Sequence:  Nucleic Acid
tcactaggggctagctacaacgagagttata

SEQ ID NO: 2483 - DNA, 31 bp, Artificial Sequence
  Description of Artificial Sequence:  Nucleic Acid
ggctgtcaggctagctacaacgataggcgag

SEQ ID NO: 2484 - DNA, 31 bp, Artificial Sequence
  Description of Artificial Sequence:  Nucleic Acid
ctgggctgggctagctacaacgacactaggc

SEQ ID NO: 2485 - DNA, 31 bp, Artificial Sequence
  Description of Artificial Sequence:  Nucleic Acid
cctctgggggctagctacaacgatgtcacta

SEQ ID NO: 2486 - DNA, 31 bp, Artificial Sequence
  Description of Artificial Sequence:  Nucleic Acid
tcggggggggctagctacaacgactctgggc

SEQ ID NO: 2487 - DNA, 31 bp, Artificial Sequence
  Description of Artificial Sequence:  Nucleic Acid
gagctgggggctagctacaacgacggggggc

SEQ ID NO: 2488 - DNA, 31 bp, Artificial Sequence
  Description of Artificial Sequence:  Nucleic Acid
agcaggagggctagctacaacgatgggtcgg

SEQ ID NO: 2489 - DNA, 31 bp, Artificial Sequence
  Description of Artificial Sequence:  Nucleic Acid
cagtggagggctagctacaacgaaggagctg

SEQ ID NO: 2490 - DNA, 31 bp, Artificial Sequence
  Description of Artificial Sequence:  Nucleic Acid
gcccccagggctagctacaacgaggagcagg

SEQ ID NO: 2491 - DNA, 31 bp, Artificial Sequence
  Description of Artificial Sequence:  Nucleic Acid
ccccggggggctagctacaacgaccccagtg

SEQ ID NO: 2492 - DNA, 31 bp, Artificial Sequence
  Description of Artificial Sequence:  Nucleic Acid
ttggggagggctagctacaacgacccggggc

SEQ ID NO: 2493 - DNA, 31 bp, Artificial Sequence
  Description of Artificial Sequence:  Nucleic Acid
ggaggccaggctagctacaacgatggggagc

SEQ ID NO: 2494 - DNA, 31 bp, Artificial Sequence
  Description of Artificial Sequence:  Nucleic Acid
aaaggaggggctagctacaacgacattgggg

SEQ ID NO: 2495 - DNA, 31 bp, Artificial Sequence
  Description of Artificial Sequence:  Nucleic Acid
agtcttcaggctagctacaacgactcctgaa

SEQ ID NO: 2496 - DNA, 31 bp, Artificial Sequence
  Description of Artificial Sequence:  Nucleic Acid
aggagaagggctagctacaacgacttcatct

SEQ ID NO: 2497 - DNA, 31 bp, Artificial Sequence
  Description of Artificial Sequence:  Nucleic Acid
gtccgcaaggctagctacaacgaggaggaga

SEQ ID NO: 2498 - DNA, 31 bp, Artificial Sequence
  Description of Artificial Sequence:  Nucleic Acid
catgtccgggctagctacaacgaaatggagg

SEQ ID NO: 2499 - DNA, 31 bp, Artificial Sequence
  Description of Artificial Sequence:  Nucleic Acid
agtccatgggctagctacaacgaccgcaatg

SEQ ID NO: 2500 - DNA, 31 bp, Artificial Sequence
  Description of Artificial Sequence:  Nucleic Acid
gaagtccaggctagctacaacgagtccgcaa

SEQ ID NO: 2501 - DNA, 31 bp, Artificial Sequence
  Description of Artificial Sequence:  Nucleic Acid
ctgagaagggctagctacaacgaccatgtcc

SEQ ID NO: 2502 - DNA, 31 bp, Artificial Sequence
  Description of Artificial Sequence:  Nucleic Acid
cagcagggggctagctacaacgatgagaagt

SEQ ID NO: 2503 - DNA, 31 bp, Artificial Sequence
  Description of Artificial Sequence:  Nucleic Acid
tgactcagggctagctacaacgaagggctga

SEQ ID NO: 2504 - DNA, 31 bp, Artificial Sequence
  Description of Artificial Sequence:  Nucleic Acid
tgatctgaggctagctacaacgatcagcagg

SEQ ID NO: 2505 - DNA, 31 bp, Artificial Sequence
  Description of Artificial Sequence:  Nucleic Acid
ggagctgaggctagctacaacgactgactca

SEQ ID NO: 2506 - DNA, 31 bp, Artificial Sequence
  Description of Artificial Sequence:  Nucleic Acid
cttaggagggctagctacaacgatgatctga

SEQ ID NO: 2507 - DNA, 31 bp, Artificial Sequence
  Description of Artificial Sequence:  Nucleic Acid
aggcgtcaggctagctacaacgaccccttag

SEQ ID NO: 2508 - DNA, 31 bp, Artificial Sequence
  Description of Artificial Sequence:  Nucleic Acid
ggcaggcgggctagctacaacgacaccccct

SEQ ID NO: 2509 - DNA, 31 bp, Artificial Sequence
  Description of Artificial Sequence:  Nucleic Acid
agggcaggggctagctacaacgagtcacccc

SEQ ID NO: 2510 - DNA, 31 bp, Artificial Sequence
  Description of Artificial Sequence:  Nucleic Acid
ggggagggggctagctacaacgaaggcgtca

SEQ ID NO: 2511 - DNA, 31 bp, Artificial Sequence
  Description of Artificial Sequence:  Nucleic Acid
aaccagtgggctagctacaacgatctgggga

SEQ ID NO: 2512 - DNA, 31 bp, Artificial Sequence
  Description of Artificial Sequence:  Nucleic Acid
gcaaccagggctagctacaacgagctctggg

SEQ ID NO: 2513 - DNA, 31 bp, Artificial Sequence
  Description of Artificial Sequence:  Nucleic Acid
ccctgcaaggctagctacaacgacagtgctc

SEQ ID NO: 2514 - DNA, 31 bp, Artificial Sequence
  Description of Artificial Sequence:  Nucleic Acid
atcccctgggctagctacaacgaaaccagtg

SEQ ID NO: 2515 - DNA, 31 bp, Artificial Sequence
  Description of Artificial Sequence:  Nucleic Acid
ggcttcaaggctagctacaacgacccctgca

SEQ ID NO: 2516 - DNA, 31 bp, Artificial Sequence
  Description of Artificial Sequence:  Nucleic Acid
ttggagggggctagctacaacgattcaatcc

SEQ ID NO: 2517 - DNA, 31 bp, Artificial Sequence
  Description of Artificial Sequence:  Nucleic Acid
cgtaagtgggctagctacaacgattttggag

SEQ ID NO: 2518 - DNA, 31 bp, Artificial Sequence
  Description of Artificial Sequence:  Nucleic Acid
tccgtaagggctagctacaacgagcttttgg

SEQ ID NO: 2519 - DNA, 31 bp, Artificial Sequence
  Description of Artificial Sequence:  Nucleic Acid
agaatccgggctagctacaacgaaagtgctt

SEQ ID NO: 2520 - DNA, 31 bp, Artificial Sequence
  Description of Artificial Sequence:  Nucleic Acid
caccagaaggctagctacaacgaccgtaagt

SEQ ID NO: 2521 - DNA, 31 bp, Artificial Sequence
  Description of Artificial Sequence:  Nucleic Acid
acaccccaggctagctacaacgacagaatcc

SEQ ID NO: 2522 - DNA, 31 bp, Artificial Sequence
  Description of Artificial Sequence:  Nucleic Acid
ggaacacaggctagctacaacgacccaccag

SEQ ID NO: 2523 - DNA, 31 bp, Artificial Sequence
  Description of Artificial Sequence:  Nucleic Acid
ttggaacaggctagctacaacgaaccccacc

SEQ ID NO: 2524 - DNA, 31 bp, Artificial Sequence
  Description of Artificial Sequence:  Nucleic Acid
agttggaaggctagctacaacgaacacccca

SEQ ID NO: 2525 - DNA, 31 bp, Artificial Sequence
  Description of Artificial Sequence:  Nucleic Acid
gggggcagggctagctacaacgatggaacac

SEQ ID NO: 2526 - DNA, 31 bp, Artificial Sequence
  Description of Artificial Sequence:  Nucleic Acid
gttgggggggctagctacaacgaagttggaa

SEQ ID NO: 2527 - DNA, 31 bp, Artificial Sequence
  Description of Artificial Sequence:  Nucleic Acid
ccacaaagggctagctacaacgatgggggca

SEQ ID NO: 2528 - DNA, 31 bp, Artificial Sequence
  Description of Artificial Sequence:  Nucleic Acid
gacatccaggctagctacaacgaaaagttgg

SEQ ID NO: 2529 - DNA, 31 bp, Artificial Sequence
  Description of Artificial Sequence:  Nucleic Acid
ggaagacaggctagctacaacgaccacaaag

SEQ ID NO: 2530 - DNA, 31 bp, Artificial Sequence
  Description of Artificial Sequence:  Nucleic Acid
aaggaagaggctagctacaacgaatccacaa

SEQ ID NO: 2531 - DNA, 31 bp, Artificial Sequence
  Description of Artificial Sequence:  Nucleic Acid
aaatatggggctagctacaacgatcccccct

SEQ ID NO: 2532 - DNA, 31 bp, Artificial Sequence
  Description of Artificial Sequence:  Nucleic Acid
ataaaataggctagctacaacgaggctcccc

SEQ ID NO: 2533 - DNA, 31 bp, Artificial Sequence
  Description of Artificial Sequence:  Nucleic Acid
gaataaaaggctagctacaacgaatggctcc

SEQ ID NO: 2534 - DNA, 31 bp, Artificial Sequence
  Description of Artificial Sequence:  Nucleic Acid
taaaagaaggctagctacaacgaaaaatatg

SEQ ID NO: 2535 - DNA, 31 bp, Artificial Sequence
  Description of Artificial Sequence:  Nucleic Acid
actgacaaggctagctacaacgaaaaagaat

SEQ ID NO: 2536 - DNA, 31 bp, Artificial Sequence
  Description of Artificial Sequence:  Nucleic Acid
gatactgaggctagctacaacgaaataaaag

SEQ ID NO: 2537 - DNA, 31 bp, Artificial Sequence
  Description of Artificial Sequence:  Nucleic Acid
tacagataggctagctacaacgatgacaata

SEQ ID NO: 2538 - DNA, 31 bp, Artificial Sequence
  Description of Artificial Sequence:  Nucleic Acid
gatacagaggctagctacaacgaactgacaa

SEQ ID NO: 2539 - DNA, 31 bp, Artificial Sequence
  Description of Artificial Sequence:  Nucleic Acid
gagagataggctagctacaacgaagatactg

SEQ ID NO: 2540 - DNA, 31 bp, Artificial Sequence
  Description of Artificial Sequence:  Nucleic Acid
gagagagaggctagctacaacgaacagatac

SEQ ID NO: 2541 - DNA, 31 bp, Artificial Sequence
  Description of Artificial Sequence:  Nucleic Acid
cttaagcaggctagctacaacgactccaaaa

SEQ ID NO: 2542 - DNA, 31 bp, Artificial Sequence
  Description of Artificial Sequence:  Nucleic Acid
tgcttaagggctagctacaacgaacctccaa

SEQ ID NO: 2543 - DNA, 31 bp, Artificial Sequence
  Description of Artificial Sequence:  Nucleic Acid
tgcttctgggctagctacaacgattaagcac

SEQ ID NO: 2544 - DNA, 31 bp, Artificial Sequence
  Description of Artificial Sequence:  Nucleic Acid
agttaatgggctagctacaacgattctgctt

SEQ ID NO: 2545 - DNA, 31 bp, Artificial Sequence
  Description of Artificial Sequence:  Nucleic Acid
gaagttaaggctagctacaacgagcttctgc

SEQ ID NO: 2546 - DNA, 31 bp, Artificial Sequence
  Description of Artificial Sequence:  Nucleic Acid
cagagaagggctagctacaacgataatgctt

SEQ ID NO: 2547 - DNA, 31 bp, Artificial Sequence
  Description of Artificial Sequence:  Nucleic Acid
ttccccagggctagctacaacgatcccccct

SEQ ID NO: 2548 - DNA, 31 bp, Artificial Sequence
  Description of Artificial Sequence:  Nucleic Acid
agtttgagggctagctacaacgattccccag

SEQ ID NO: 2549 - DNA, 31 bp, Artificial Sequence
  Description of Artificial Sequence:  Nucleic Acid
gggaaaagggctagctacaacgattgagttt

SEQ ID NO: 2550 - DNA, 31 bp, Artificial Sequence
  Description of Artificial Sequence:  Nucleic Acid
catcaggaggctagctacaacgaaggggaaa

SEQ ID NO: 2551 - DNA, 31 bp, Artificial Sequence
  Description of Artificial Sequence:  Nucleic Acid
gctgaccaggctagctacaacgacaggacag

SEQ ID NO: 2552 - DNA, 31 bp, Artificial Sequence
  Description of Artificial Sequence:  Nucleic Acid
ggagctgaggctagctacaacgacatcagga

SEQ ID NO: 2553 - DNA, 31 bp, Artificial Sequence
  Description of Artificial Sequence:  Nucleic Acid
gaagggagggctagctacaacgatgaccatc

SEQ ID NO: 2554 - DNA, 31 bp, Artificial Sequence
  Description of Artificial Sequence:  Nucleic Acid
gttccctaggctagctacaacgaagagaagg

SEQ ID NO: 2555 - DNA, 31 bp, Artificial Sequence
  Description of Artificial Sequence:  Nucleic Acid
ccccacagggctagctacaacgatccctaca

SEQ ID NO: 2556 - DNA, 31 bp, Artificial Sequence
  Description of Artificial Sequence:  Nucleic Acid
ggaccccaggctagctacaacgaagttccct

SEQ ID NO: 2557 - DNA, 31 bp, Artificial Sequence
  Description of Artificial Sequence:  Nucleic Acid
atgggggaggctagctacaacgacccacagt

SEQ ID NO: 2558 - DNA, 31 bp, Artificial Sequence
  Description of Artificial Sequence:  Nucleic Acid
gatggggaggctagctacaacgagggggacc

SEQ ID NO: 2559 - DNA, 31 bp, Artificial Sequence
  Description of Artificial Sequence:  Nucleic Acid
ctggaggaggctagctacaacgaggggatgg

SEQ ID NO: 2560 - DNA, 31 bp, Artificial Sequence
  Description of Artificial Sequence:  Nucleic Acid
accagaagggctagctacaacgatggaggat

SEQ ID NO: 2561 - DNA, 31 bp, Artificial Sequence
  Description of Artificial Sequence:  Nucleic Acid
ggagagtaggctagctacaacgacagaagct

SEQ ID NO: 2562 - DNA, 31 bp, Artificial Sequence
  Description of Artificial Sequence:  Nucleic Acid
taggagagggctagctacaacgaaccagaag

SEQ ID NO: 2563 - DNA, 31 bp, Artificial Sequence
  Description of Artificial Sequence:  Nucleic Acid
tgcttctgggctagctacaacgactctagga

SEQ ID NO: 2564 - DNA, 31 bp, Artificial Sequence
  Description of Artificial Sequence:  Nucleic Acid
ccagcctgggctagctacaacgattctgtct

SEQ ID NO: 2565 - DNA, 31 bp, Artificial Sequence
  Description of Artificial Sequence:  Nucleic Acid
acctccagggctagctacaacgactgcttct

SEQ ID NO: 2566 - DNA, 31 bp, Artificial Sequence
  Description of Artificial Sequence:  Nucleic Acid
aggccttaggctagctacaacgactccagcc

SEQ ID NO: 2567 - DNA, 31 bp, Artificial Sequence
  Description of Artificial Sequence:  Nucleic Acid
ctcaaaggggctagctacaacgacttacctc

SEQ ID NO: 2568 - DNA, 31 bp, Artificial Sequence
  Description of Artificial Sequence:  Nucleic Acid
tttgtgggggctagctacaacgatcaaaggc

SEQ ID NO: 2569 - DNA, 31 bp, Artificial Sequence
  Description of Artificial Sequence:  Nucleic Acid
aggctttgggctagctacaacgagggctcaa

SEQ ID NO: 2570 - DNA, 31 bp, Artificial Sequence
  Description of Artificial Sequence:  Nucleic Acid
tgataaggggctagctacaacgatttgtggg

SEQ ID NO: 2571 - DNA, 31 bp, Artificial Sequence
  Description of Artificial Sequence:  Nucleic Acid
acacttgaggctagctacaacgaaaggcttt

SEQ ID NO: 2572 - DNA, 31 bp, Artificial Sequence
  Description of Artificial Sequence:  Nucleic Acid
ggaagacaggctagctacaacgattgataag

SEQ ID NO: 2573 - DNA, 31 bp, Artificial Sequence
  Description of Artificial Sequence:  Nucleic Acid
atggaagaggctagctacaacgaacttgata

SEQ ID NO: 2574 - DNA, 31 bp, Artificial Sequence
  Description of Artificial Sequence:  Nucleic Acid
atccatgaggctagctacaacgaggaagaca

SEQ ID NO: 2575 - DNA, 31 bp, Artificial Sequence
  Description of Artificial Sequence:  Nucleic Acid
tgaatccaggctagctacaacgagatggaag

SEQ ID NO: 2576 - DNA, 31 bp, Artificial Sequence
  Description of Artificial Sequence:  Nucleic Acid
gtaatgaaggctagctacaacgaccatgatg

SEQ ID NO: 2577 - DNA, 31 bp, Artificial Sequence
  Description of Artificial Sequence:  Nucleic Acid
agctgtaaggctagctacaacgagaatccat

SEQ ID NO: 2578 - DNA, 31 bp, Artificial Sequence
  Description of Artificial Sequence:  Nucleic Acid
ttaagctgggctagctacaacgaaatgaatc

SEQ ID NO: 2579 - DNA, 31 bp, Artificial Sequence
  Description of Artificial Sequence:  Nucleic Acid
tgattaagggctagctacaacgatgtaatga

SEQ ID NO: 2580 - DNA, 31 bp, Artificial Sequence
  Description of Artificial Sequence:  Nucleic Acid
tattttgaggctagctacaacgataagctgt

SEQ ID NO: 2581 - DNA, 31 bp, Artificial Sequence
  Description of Artificial Sequence:  Nucleic Acid
gggcgttaggctagctacaacgatttgatta

SEQ ID NO: 2582 - DNA, 31 bp, Artificial Sequence
  Description of Artificial Sequence:  Nucleic Acid
ctggggcgggctagctacaacgatattttga

SEQ ID NO: 2583 - DNA, 31 bp, Artificial Sequence
  Description of Artificial Sequence:  Nucleic Acid
atctggggggctagctacaacgagttatttt

SEQ ID NO: 2584 - DNA, 31 bp, Artificial Sequence
  Description of Artificial Sequence:  Nucleic Acid
ggctggtaggctagctacaacgactggggcg

SEQ ID NO: 2585 - DNA, 31 bp, Artificial Sequence
  Description of Artificial Sequence:  Nucleic Acid
ggggctggggctagctacaacgaatctgggg

SEQ ID NO: 2586 - DNA, 31 bp, Artificial Sequence
  Description of Artificial Sequence:  Nucleic Acid
tacaggggggctagctacaacgatggtatct

SEQ ID NO: 2587 - DNA, 31 bp, Artificial Sequence
  Description of Artificial Sequence:  Nucleic Acid
gtgccataggctagctacaacgaaggggctg

SEQ ID NO: 2588 - DNA, 31 bp, Artificial Sequence
  Description of Artificial Sequence:  Nucleic Acid
cagtgccaggctagctacaacgaacaggggc

SEQ ID NO: 2589 - DNA, 31 bp, Artificial Sequence
  Description of Artificial Sequence:  Nucleic Acid
tgccagtgggctagctacaacgacatacagg

SEQ ID NO: 2590 - DNA, 31 bp, Artificial Sequence
  Description of Artificial Sequence:  Nucleic Acid
aatgccagggctagctacaacgagccataca

SEQ ID NO: 2591 - DNA, 31 bp, Artificial Sequence
  Description of Artificial Sequence:  Nucleic Acid
ggacaatgggctagctacaacgacagtgcca

SEQ ID NO: 2592 - DNA, 31 bp, Artificial Sequence
  Description of Artificial Sequence:  Nucleic Acid
agggacaaggctagctacaacgagccagtgc

SEQ ID NO: 2593 - DNA, 31 bp, Artificial Sequence
  Description of Artificial Sequence:  Nucleic Acid
cacagggaggctagctacaacgaaatgccag

SEQ ID NO: 2594 - DNA, 31 bp, Artificial Sequence
  Description of Artificial Sequence:  Nucleic Acid
gttaggcaggctagctacaacgaagggacaa

SEQ ID NO: 2595 - DNA, 31 bp, Artificial Sequence
  Description of Artificial Sequence:  Nucleic Acid
gtgttaggggctagctacaacgaacagggac

SEQ ID NO: 2596 - DNA, 31 bp, Artificial Sequence
  Description of Artificial Sequence:  Nucleic Acid
cgctggtgggctagctacaacgataggcaca

SEQ ID NO: 2597 - DNA, 31 bp, Artificial Sequence
  Description of Artificial Sequence:  Nucleic Acid
aacgctggggctagctacaacgagttaggca

SEQ ID NO: 2598 - DNA, 31 bp, Artificial Sequence
  Description of Artificial Sequence:  Nucleic Acid
ctcaaacgggctagctacaacgatggtgtta

SEQ ID NO: 2599 - DNA, 31 bp, Artificial Sequence
  Description of Artificial Sequence:  Nucleic Acid
ccctcaaaggctagctacaacgagctggtgt

SEQ ID NO: 2600 - DNA, 31 bp, Artificial Sequence
  Description of Artificial Sequence:  Nucleic Acid
gaaggcagggctagctacaacgaccctcaaa

SEQ ID NO: 2601 - DNA, 31 bp, Artificial Sequence
  Description of Artificial Sequence:  Nucleic Acid
caggaaggggctagctacaacgaagcccctc

SEQ ID NO: 2602 - DNA, 31 bp, Artificial Sequence
  Description of Artificial Sequence:  Nucleic Acid
ctgtagggggctagctacaacgaaggaaggc

SEQ ID NO: 2603 - DNA, 31 bp, Artificial Sequence
  Description of Artificial Sequence:  Nucleic Acid
gacctctgggctagctacaacgaagggcagg

SEQ ID NO: 2604 - DNA, 31 bp, Artificial Sequence
  Description of Artificial Sequence:  Nucleic Acid
ggcagagaggctagctacaacgactctgtag

SEQ ID NO: 2605 - DNA, 31 bp, Artificial Sequence
  Description of Artificial Sequence:  Nucleic Acid
agagccggggctagctacaacgaagagacct

SEQ ID NO: 2606 - DNA, 31 bp, Artificial Sequence
  Description of Artificial Sequence:  Nucleic Acid
ggaaagagggctagctacaacgacggcagag

SEQ ID NO: 2607 - DNA, 31 bp, Artificial Sequence
  Description of Artificial Sequence:  Nucleic Acid
tggttgagggctagctacaacgaaaggaaag

SEQ ID NO: 2608 - DNA, 31 bp, Artificial Sequence
  Description of Artificial Sequence:  Nucleic Acid
agccatggggctagctacaacgatgagcaag

SEQ ID NO: 2609 - DNA, 31 bp, Artificial Sequence
  Description of Artificial Sequence:  Nucleic Acid
ttcagccaggctagctacaacgaggttgagc

SEQ ID NO: 2610 - DNA, 31 bp, Artificial Sequence
  Description of Artificial Sequence:  Nucleic Acid
tccttcagggctagctacaacgacatggttg

SEQ ID NO: 2611 - DNA, 31 bp, Artificial Sequence
  Description of Artificial Sequence:  Nucleic Acid
ttgcactgggctagctacaacgattccttca

SEQ ID NO: 2612 - DNA, 31 bp, Artificial Sequence
  Description of Artificial Sequence:  Nucleic Acid
ctgttgcaggctagctacaacgatgtttcct

SEQ ID NO: 2613 - DNA, 31 bp, Artificial Sequence
  Description of Artificial Sequence:  Nucleic Acid
tgctgttgggctagctacaacgaactgtttc

SEQ ID NO: 2614 - DNA, 31 bp, Artificial Sequence
  Description of Artificial Sequence:  Nucleic Acid
cagtgctgggctagctacaacgatgcactgt

SEQ ID NO: 2615 - DNA, 31 bp, Artificial Sequence
  Description of Artificial Sequence:  Nucleic Acid
agccagtgggctagctacaacgatgttgcac

SEQ ID NO: 2616 - DNA, 31 bp, Artificial Sequence
  Description of Artificial Sequence:  Nucleic Acid
agagccagggctagctacaacgagctgttgc

SEQ ID NO: 2617 - DNA, 31 bp, Artificial Sequence
  Description of Artificial Sequence:  Nucleic Acid
ggagagagggctagctacaacgacagtgctg

SEQ ID NO: 2618 - DNA, 31 bp, Artificial Sequence
  Description of Artificial Sequence:  Nucleic Acid
cttctggaggctagctacaacgacctggaga

SEQ ID NO: 2619 - DNA, 31 bp, Artificial Sequence
  Description of Artificial Sequence:  Nucleic Acid
agaccaaaggctagctacaacgacccttctg

SEQ ID NO: 2620 - DNA, 31 bp, Artificial Sequence
  Description of Artificial Sequence:  Nucleic Acid
agtccagaggctagctacaacgacaaacccc

SEQ ID NO: 2621 - DNA, 31 bp, Artificial Sequence
  Description of Artificial Sequence:  Nucleic Acid
caaggaagggctagctacaacgaccagacca

SEQ ID NO: 2622 - DNA, 31 bp, Artificial Sequence
  Description of Artificial Sequence:  Nucleic Acid
ggggagagggctagctacaacgaaaggaagt

SEQ ID NO: 2623 - DNA, 31 bp, Artificial Sequence
  Description of Artificial Sequence:  Nucleic Acid
ttaaggcaggctagctacaacgattgagaag

SEQ ID NO: 2624 - DNA, 31 bp, Artificial Sequence
  Description of Artificial Sequence:  Nucleic Acid
tattaaggggctagctacaacgaacttgaga

SEQ ID NO: 2625 - DNA, 31 bp, Artificial Sequence
  Description of Artificial Sequence:  Nucleic Acid
ccctactaggctagctacaacgataaggcac

SEQ ID NO: 2626 - DNA, 31 bp, Artificial Sequence
  Description of Artificial Sequence:  Nucleic Acid
ttaccctaggctagctacaacgatattaagg

SEQ ID NO: 2627 - DNA, 31 bp, Artificial Sequence
  Description of Artificial Sequence:  Nucleic Acid
acaacttaggctagctacaacgacctactat

SEQ ID NO: 2628 - DNA, 31 bp, Artificial Sequence
  Description of Artificial Sequence:  Nucleic Acid
cttaacaaggctagctacaacgattacccta

SEQ ID NO: 2629 - DNA, 31 bp, Artificial Sequence
  Description of Artificial Sequence:  Nucleic Acid
actcttaaggctagctacaacgaaacttacc

SEQ ID NO: 2630 - DNA, 31 bp, Artificial Sequence
  Description of Artificial Sequence:  Nucleic Acid
ctcccccaggctagctacaacgatcttaaca

SEQ ID NO: 2631 - DNA, 31 bp, Artificial Sequence
  Description of Artificial Sequence:  Nucleic Acid
ccagcctgggctagctacaacgatctccccc

SEQ ID NO: 2632 - DNA, 31 bp, Artificial Sequence
  Description of Artificial Sequence:  Nucleic Acid
gctgccagggctagctacaacgactgctctc

SEQ ID NO: 2633 - DNA, 31 bp, Artificial Sequence
  Description of Artificial Sequence:  Nucleic Acid
gagagctgggctagctacaacgacagcctgc

SEQ ID NO: 2634 - DNA, 31 bp, Artificial Sequence
  Description of Artificial Sequence:  Nucleic Acid
ctggagagggctagctacaacgatgccagcc

SEQ ID NO: 2635 - DNA, 31 bp, Artificial Sequence
  Description of Artificial Sequence:  Nucleic Acid
cctcctgaggctagctacaacgatggagagc

SEQ ID NO: 2636 - DNA, 31 bp, Artificial Sequence
  Description of Artificial Sequence:  Nucleic Acid
aaactatgggctagctacaacgactcctgac

SEQ ID NO: 2637 - DNA, 31 bp, Artificial Sequence
  Description of Artificial Sequence:  Nucleic Acid
aaaaactaggctagctacaacgagcctcctg

SEQ ID NO: 2638 - DNA, 31 bp, Artificial Sequence
  Description of Artificial Sequence:  Nucleic Acid
actaaaaaggctagctacaacgatatgcctc

SEQ ID NO: 2639 - DNA, 31 bp, Artificial Sequence
  Description of Artificial Sequence:  Nucleic Acid
attgttcaggctagctacaacgataaaaact

SEQ ID NO: 2640 - DNA, 31 bp, Artificial Sequence
  Description of Artificial Sequence:  Nucleic Acid
tttgattgggctagctacaacgatcactaaa

SEQ ID NO: 2641 - DNA, 31 bp, Artificial Sequence
  Description of Artificial Sequence:  Nucleic Acid
tgctttgaggctagctacaacgatgttcact

SEQ ID NO: 2642 - DNA, 31 bp, Artificial Sequence
  Description of Artificial Sequence:  Nucleic Acid
tccaagtgggctagctacaacgatttgattg

SEQ ID NO: 2643 - DNA, 31 bp, Artificial Sequence
  Description of Artificial Sequence:  Nucleic Acid
agtccaagggctagctacaacgagctttgat

SEQ ID NO: 2644 - DNA, 31 bp, Artificial Sequence
  Description of Artificial Sequence:  Nucleic Acid
agcaagagggctagctacaacgaccaagtgc

SEQ ID NO: 2645 - DNA, 31 bp, Artificial Sequence
  Description of Artificial Sequence:  Nucleic Acid
agaaagagggctagctacaacgaaagagtcc

SEQ ID NO: 2646 - DNA, 31 bp, Artificial Sequence
  Description of Artificial Sequence:  Nucleic Acid
gttcagagggctagctacaacgaagaaagag

SEQ ID NO: 2647 - DNA, 31 bp, Artificial Sequence
  Description of Artificial Sequence:  Nucleic Acid
tttattagggctagctacaacgatcagagta

SEQ ID NO: 2648 - DNA, 31 bp, Artificial Sequence
  Description of Artificial Sequence:  Nucleic Acid
cagctttaggctagctacaacgatagttcag

SEQ ID NO: 2649 - DNA, 31 bp, Artificial Sequence
  Description of Artificial Sequence:  Nucleic Acid
ggcaacagggctagctacaacgatttattag

SEQ ID NO: 2650 - DNA, 31 bp, Artificial Sequence
  Description of Artificial Sequence:  Nucleic Acid
cttggcaaggctagctacaacgaagctttat

SEQ ID NO: 2651 - DNA, 31 bp, Artificial Sequence
  Description of Artificial Sequence:  Nucleic Acid
cagcttggggctagctacaacgaaacagctt

SEQ ID NO: 2652 - DNA, 31 bp, Artificial Sequence
  Description of Artificial Sequence:  Nucleic Acid
ccgtccagggctagctacaacgattggcaac

SEQ ID NO: 2653 - DNA, 31 bp, Artificial Sequence
  Description of Artificial Sequence:  Nucleic Acid
tcgtgccgggctagctacaacgaccagcttg

SEQ ID NO: 2654 - DNA, 31 bp, Artificial Sequence
  Description of Artificial Sequence:  Nucleic Acid
agctcgtgggctagctacaacgacgtccagc

SEQ ID NO: 2655 - DNA, 31 bp, Artificial Sequence
  Description of Artificial Sequence:  Nucleic Acid
cgagctcgggctagctacaacgagccgtcca

SEQ ID NO: 2656 - DNA, 31 bp, Artificial Sequence
  Description of Artificial Sequence:  Nucleic Acid
ggcacgagggctagctacaacgatcgtgccg

SEQ ID NO: 2657 - RNA, 17 nt, Artificial Sequence
  Description of Artificial Sequence:  Nucleic Acid
cacgaggcggggccggg

SEQ ID NO: 2658 - RNA, 17 nt, Artificial Sequence
  Description of Artificial Sequence:  Nucleic Acid
acgaggcggggccgggu

SEQ ID NO: 2659 - RNA, 17 nt, Artificial Sequence
  Description of Artificial Sequence:  Nucleic Acid
cgaggcggggccggguc

SEQ ID NO: 2660 - RNA, 17 nt, Artificial Sequence
  Description of Artificial Sequence:  Nucleic Acid
gcggggccgggucgcag

SEQ ID NO: 2661 - RNA, 17 nt, Artificial Sequence
  Description of Artificial Sequence:  Nucleic Acid
cggggccgggucgcagc

SEQ ID NO: 2662 - RNA, 17 nt, Artificial Sequence
  Description of Artificial Sequence:  Nucleic Acid
ucgcagcugggcccgcg

SEQ ID NO: 2663 - RNA, 17 nt, Artificial Sequence
  Description of Artificial Sequence:  Nucleic Acid
cgcagcugggcccgcgg

SEQ ID NO: 2664 - RNA, 17 nt, Artificial Sequence
  Description of Artificial Sequence:  Nucleic Acid
gggcccgcggcauggac

SEQ ID NO: 2665 - RNA, 17 nt, Artificial Sequence
  Description of Artificial Sequence:  Nucleic Acid
cgcggcauggacgaacu

SEQ ID NO: 2666 - RNA, 17 nt, Artificial Sequence
  Description of Artificial Sequence:  Nucleic Acid
gcggcauggacgaacug

SEQ ID NO: 2667 - RNA, 17 nt, Artificial Sequence
  Description of Artificial Sequence:  Nucleic Acid
gcauggacgaacuguuc

SEQ ID NO: 2668 - RNA, 17 nt, Artificial Sequence
  Description of Artificial Sequence:  Nucleic Acid
aucuucccggcagagca

SEQ ID NO: 2669 - RNA, 17 nt, Artificial Sequence
  Description of Artificial Sequence:  Nucleic Acid
ucccggcagagcagccc

SEQ ID NO: 2670 - RNA, 17 nt, Artificial Sequence
  Description of Artificial Sequence:  Nucleic Acid
caagcagcggggcaugc

SEQ ID NO: 2671 - RNA, 17 nt, Artificial Sequence
  Description of Artificial Sequence:  Nucleic Acid
aagcagcggggcaugcg

SEQ ID NO: 2672 - RNA, 17 nt, Artificial Sequence
  Description of Artificial Sequence:  Nucleic Acid
agcagcggggcaugcgc

SEQ ID NO: 2673 - RNA, 17 nt, Artificial Sequence
  Description of Artificial Sequence:  Nucleic Acid
acaagugcgaggggcgc

SEQ ID NO: 2674 - RNA, 17 nt, Artificial Sequence
  Description of Artificial Sequence:  Nucleic Acid
aagugcgaggggcgcuc

SEQ ID NO: 2675 - RNA, 17 nt, Artificial Sequence
  Description of Artificial Sequence:  Nucleic Acid
agugcgaggggcgcucc

SEQ ID NO: 2676 - RNA, 17 nt, Artificial Sequence
  Description of Artificial Sequence:  Nucleic Acid
gugcgaggggcgcuccg

SEQ ID NO: 2677 - RNA, 17 nt, Artificial Sequence
  Description of Artificial Sequence:  Nucleic Acid
cgcuccgcgggcagcau

SEQ ID NO: 2678 - RNA, 17 nt, Artificial Sequence
  Description of Artificial Sequence:  Nucleic Acid
gcuccgcgggcagcauc

SEQ ID NO: 2679 - RNA, 17 nt, Artificial Sequence
  Description of Artificial Sequence:  Nucleic Acid
gcaucccaggcgagagg

SEQ ID NO: 2680 - RNA, 17 nt, Artificial Sequence
  Description of Artificial Sequence:  Nucleic Acid
ucccaggcgagaggagc

SEQ ID NO: 2681 - RNA, 17 nt, Artificial Sequence
  Description of Artificial Sequence:  Nucleic Acid
ccaggcgagaggagcac

SEQ ID NO: 2682 - RNA, 17 nt, Artificial Sequence
  Description of Artificial Sequence:  Nucleic Acid
aggcgagaggagcacag

SEQ ID NO: 2683 - RNA, 17 nt, Artificial Sequence
  Description of Artificial Sequence:  Nucleic Acid
ggcgagaggagcacaga

SEQ ID NO: 2684 - RNA, 17 nt, Artificial Sequence
  Description of Artificial Sequence:  Nucleic Acid
ggagcacagauaccacc

SEQ ID NO: 2685 - RNA, 17 nt, Artificial Sequence
  Description of Artificial Sequence:  Nucleic Acid
accaccaagacccaccc

SEQ ID NO: 2686 - RNA, 17 nt, Artificial Sequence
  Description of Artificial Sequence:  Nucleic Acid
accaucaagaucaaugg

SEQ ID NO: 2687 - RNA, 17 nt, Artificial Sequence
  Description of Artificial Sequence:  Nucleic Acid
agaucaauggcuacaca

SEQ ID NO: 2688 - RNA, 17 nt, Artificial Sequence
  Description of Artificial Sequence:  Nucleic Acid
gcuacacaggaccaggg

SEQ ID NO: 2689 - RNA, 17 nt, Artificial Sequence
  Description of Artificial Sequence:  Nucleic Acid
cuacacaggaccaggga

SEQ ID NO: 2690 - RNA, 17 nt, Artificial Sequence
  Description of Artificial Sequence:  Nucleic Acid
caggaccagggacagug

SEQ ID NO: 2691 - RNA, 17 nt, Artificial Sequence
  Description of Artificial Sequence:  Nucleic Acid
aggaccagggacagugc

SEQ ID NO: 2692 - RNA, 17 nt, Artificial Sequence
  Description of Artificial Sequence:  Nucleic Acid
ggaccagggacagugcg

SEQ ID NO: 2693 - RNA, 17 nt, Artificial Sequence
  Description of Artificial Sequence:  Nucleic Acid
aucucccuggucaccaa

SEQ ID NO: 2694 - RNA, 17 nt, Artificial Sequence
  Description of Artificial Sequence:  Nucleic Acid
gucaccaaggacccucc

SEQ ID NO: 2695 - RNA, 17 nt, Artificial Sequence
  Description of Artificial Sequence:  Nucleic Acid
ucaccaaggacccuccu

SEQ ID NO: 2696 - RNA, 17 nt, Artificial Sequence
  Description of Artificial Sequence:  Nucleic Acid
uccucaccggccucacc

SEQ ID NO: 2697 - RNA, 17 nt, Artificial Sequence
  Description of Artificial Sequence:  Nucleic Acid
acccccacgagcuugua

SEQ ID NO: 2698 - RNA, 17 nt, Artificial Sequence
  Description of Artificial Sequence:  Nucleic Acid
agcuuguaggaaaggac

SEQ ID NO: 2699 - RNA, 17 nt, Artificial Sequence
  Description of Artificial Sequence:  Nucleic Acid
gcuuguaggaaaggacu

SEQ ID NO: 2700 - RNA, 17 nt, Artificial Sequence
  Description of Artificial Sequence:  Nucleic Acid
guaggaaaggacugccg

SEQ ID NO: 2701 - RNA, 17 nt, Artificial Sequence
  Description of Artificial Sequence:  Nucleic Acid
uaggaaaggacugccgg

SEQ ID NO: 2702 - RNA, 17 nt, Artificial Sequence
  Description of Artificial Sequence:  Nucleic Acid
ggacugccgggauggcu

SEQ ID NO: 2703 - RNA, 17 nt, Artificial Sequence
  Description of Artificial Sequence:  Nucleic Acid
gacugccgggauggcuu

SEQ ID NO: 2704 - RNA, 17 nt, Artificial Sequence
  Description of Artificial Sequence:  Nucleic Acid
acugccgggauggcuuc

SEQ ID NO: 2705 - RNA, 17 nt, Artificial Sequence
  Description of Artificial Sequence:  Nucleic Acid
gccgggauggcuucuau

SEQ ID NO: 2706 - RNA, 17 nt, Artificial Sequence
  Description of Artificial Sequence:  Nucleic Acid
gcuucuaugaggcugag

SEQ ID NO: 2707 - RNA, 17 nt, Artificial Sequence
  Description of Artificial Sequence:  Nucleic Acid
uucuaugaggcugagcu

SEQ ID NO: 2708 - RNA, 17 nt, Artificial Sequence
  Description of Artificial Sequence:  Nucleic Acid
augaggcugagcucugc

SEQ ID NO: 2709 - RNA, 17 nt, Artificial Sequence
  Description of Artificial Sequence:  Nucleic Acid
cucugcccggaccgcug

SEQ ID NO: 2710 - RNA, 17 nt, Artificial Sequence
  Description of Artificial Sequence:  Nucleic Acid
ucugcccggaccgcugc

SEQ ID NO: 2711 - RNA, 17 nt, Artificial Sequence
  Description of Artificial Sequence:  Nucleic Acid
aguuuccagaaccuggg

SEQ ID NO: 2712 - RNA, 17 nt, Artificial Sequence
  Description of Artificial Sequence:  Nucleic Acid
cagaaccugggaaucca

SEQ ID NO: 2713 - RNA, 17 nt, Artificial Sequence
  Description of Artificial Sequence:  Nucleic Acid
agaaccugggaauccag

SEQ ID NO: 2714 - RNA, 17 nt, Artificial Sequence
  Description of Artificial Sequence:  Nucleic Acid
gaaccugggaauccagu

SEQ ID NO: 2715 - RNA, 17 nt, Artificial Sequence
  Description of Artificial Sequence:  Nucleic Acid
cagugugugaagaagcg

SEQ ID NO: 2716 - RNA, 17 nt, Artificial Sequence
  Description of Artificial Sequence:  Nucleic Acid
ugugugaagaagcggga

SEQ ID NO: 2717 - RNA, 17 nt, Artificial Sequence
  Description of Artificial Sequence:  Nucleic Acid
gaagaagcgggaccugg

SEQ ID NO: 2718 - RNA, 17 nt, Artificial Sequence
  Description of Artificial Sequence:  Nucleic Acid
aagaagcgggaccugga

SEQ ID NO: 2719 - RNA, 17 nt, Artificial Sequence
  Description of Artificial Sequence:  Nucleic Acid
agaagcgggaccuggag

SEQ ID NO: 2720 - RNA, 17 nt, Artificial Sequence
  Description of Artificial Sequence:  Nucleic Acid
cgggaccuggagcaggc

SEQ ID NO: 2721 - RNA, 17 nt, Artificial Sequence
  Description of Artificial Sequence:  Nucleic Acid
gggaccuggagcaggcu

SEQ ID NO: 2722 - RNA, 17 nt, Artificial Sequence
  Description of Artificial Sequence:  Nucleic Acid
cuggagcaggcuaucag

SEQ ID NO: 2723 - RNA, 17 nt, Artificial Sequence
  Description of Artificial Sequence:  Nucleic Acid
cgcauccagaccaacaa

SEQ ID NO: 2724 - RNA, 17 nt, Artificial Sequence
  Description of Artificial Sequence:  Nucleic Acid
uuccuauagaagagcag

SEQ ID NO: 2725 - RNA, 17 nt, Artificial Sequence
  Description of Artificial Sequence:  Nucleic Acid
cuauagaagagcagcgu

SEQ ID NO: 2726 - RNA, 17 nt, Artificial Sequence
  Description of Artificial Sequence:  Nucleic Acid
agcagcguggggacuac

SEQ ID NO: 2727 - RNA, 17 nt, Artificial Sequence
  Description of Artificial Sequence:  Nucleic Acid
gcagcguggggacuacg

SEQ ID NO: 2728 - RNA, 17 nt, Artificial Sequence
  Description of Artificial Sequence:  Nucleic Acid
cagcguggggacuacga

SEQ ID NO: 2729 - RNA, 17 nt, Artificial Sequence
  Description of Artificial Sequence:  Nucleic Acid
agcguggggacuacgac

SEQ ID NO: 2730 - RNA, 17 nt, Artificial Sequence
  Description of Artificial Sequence:  Nucleic Acid
gggacuacgaccugaau

SEQ ID NO: 2731 - RNA, 17 nt, Artificial Sequence
  Description of Artificial Sequence:  Nucleic Acid
uacgaccugaaugcugu

SEQ ID NO: 2732 - RNA, 17 nt, Artificial Sequence
  Description of Artificial Sequence:  Nucleic Acid
ugcugugcggcucugcu

SEQ ID NO: 2733 - RNA, 17 nt, Artificial Sequence
  Description of Artificial Sequence:  Nucleic Acid
ugcuuccaggugacagu

SEQ ID NO: 2734 - RNA, 17 nt, Artificial Sequence
  Description of Artificial Sequence:  Nucleic Acid
uuccaggugacagugcg

SEQ ID NO: 2735 - RNA, 17 nt, Artificial Sequence
  Description of Artificial Sequence:  Nucleic Acid
gacagugcgggacccau

SEQ ID NO: 2736 - RNA, 17 nt, Artificial Sequence
  Description of Artificial Sequence:  Nucleic Acid
acagugcgggacccauc

SEQ ID NO: 2737 - RNA, 17 nt, Artificial Sequence
  Description of Artificial Sequence:  Nucleic Acid
cagugcgggacccauca

SEQ ID NO: 2738 - RNA, 17 nt, Artificial Sequence
  Description of Artificial Sequence:  Nucleic Acid
acccaucaggcaggccc

SEQ ID NO: 2739 - RNA, 17 nt, Artificial Sequence
  Description of Artificial Sequence:  Nucleic Acid
aucaggcaggccccucc

SEQ ID NO: 2740 - RNA, 17 nt, Artificial Sequence
  Description of Artificial Sequence:  Nucleic Acid
ccaucuuugacaaucgu

SEQ ID NO: 2741 - RNA, 17 nt, Artificial Sequence
  Description of Artificial Sequence:  Nucleic Acid
acacugccgagcucaag

SEQ ID NO: 2742 - RNA, 17 nt, Artificial Sequence
  Description of Artificial Sequence:  Nucleic Acid
gagcucaagaucugccg

SEQ ID NO: 2743 - RNA, 17 nt, Artificial Sequence
  Description of Artificial Sequence:  Nucleic Acid
gaucugccgagugaacc

SEQ ID NO: 2744 - RNA, 17 nt, Artificial Sequence
  Description of Artificial Sequence:  Nucleic Acid
ugccgagugaaccgaaa

SEQ ID NO: 2745 - RNA, 17 nt, Artificial Sequence
  Description of Artificial Sequence:  Nucleic Acid
agugaaccgaaacucug

SEQ ID NO: 2746 - RNA, 17 nt, Artificial Sequence
  Description of Artificial Sequence:  Nucleic Acid
gaaacucuggcagcugc

SEQ ID NO: 2747 - RNA, 17 nt, Artificial Sequence
  Description of Artificial Sequence:  Nucleic Acid
gcugccucgguggggau

SEQ ID NO: 2748 - RNA, 17 nt, Artificial Sequence
  Description of Artificial Sequence:  Nucleic Acid
gccucgguggggaugag

SEQ ID NO: 2749 - RNA, 17 nt, Artificial Sequence
  Description of Artificial Sequence:  Nucleic Acid
ccucgguggggaugaga

SEQ ID NO: 2750 - RNA, 17 nt, Artificial Sequence
  Description of Artificial Sequence:  Nucleic Acid
cucgguggggaugagau

SEQ ID NO: 2751 - RNA, 17 nt, Artificial Sequence
  Description of Artificial Sequence:  Nucleic Acid
ucgguggggaugagauc

SEQ ID NO: 2752 - RNA, 17 nt, Artificial Sequence
  Description of Artificial Sequence:  Nucleic Acid
guggggaugagaucuuc

SEQ ID NO: 2753 - RNA, 17 nt, Artificial Sequence
  Description of Artificial Sequence:  Nucleic Acid
ggggaugagaucuuccu

SEQ ID NO: 2754 - RNA, 17 nt, Artificial Sequence
  Description of Artificial Sequence:  Nucleic Acid
uacugugugacaaggug

SEQ ID NO: 2755 - RNA, 17 nt, Artificial Sequence
  Description of Artificial Sequence:  Nucleic Acid
ugugacaaggugcagaa

SEQ ID NO: 2756 - RNA, 17 nt, Artificial Sequence
  Description of Artificial Sequence:  Nucleic Acid
aaggugcagaaagagga

SEQ ID NO: 2757 - RNA, 17 nt, Artificial Sequence
  Description of Artificial Sequence:  Nucleic Acid
ugcagaaagaggacauu

SEQ ID NO: 2758 - RNA, 17 nt, Artificial Sequence
  Description of Artificial Sequence:  Nucleic Acid
cagaaagaggacauuga

SEQ ID NO: 2759 - RNA, 17 nt, Artificial Sequence
  Description of Artificial Sequence:  Nucleic Acid
agaaagaggacauugag

SEQ ID NO: 2760 - RNA, 17 nt, Artificial Sequence
  Description of Artificial Sequence:  Nucleic Acid
aggacauugagguguau

SEQ ID NO: 2761 - RNA, 17 nt, Artificial Sequence
  Description of Artificial Sequence:  Nucleic Acid
gacauugagguguauuu

SEQ ID NO: 2762 - RNA, 17 nt, Artificial Sequence
  Description of Artificial Sequence:  Nucleic Acid
uauuucacgggaccagg

SEQ ID NO: 2763 - RNA, 17 nt, Artificial Sequence
  Description of Artificial Sequence:  Nucleic Acid
auuucacgggaccaggc

SEQ ID NO: 2764 - RNA, 17 nt, Artificial Sequence
  Description of Artificial Sequence:  Nucleic Acid
uuucacgggaccaggcu

SEQ ID NO: 2765 - RNA, 17 nt, Artificial Sequence
  Description of Artificial Sequence:  Nucleic Acid
cgggaccaggcugggag

SEQ ID NO: 2766 - RNA, 17 nt, Artificial Sequence
  Description of Artificial Sequence:  Nucleic Acid
accaggcugggaggccc

SEQ ID NO: 2767 - RNA, 17 nt, Artificial Sequence
  Description of Artificial Sequence:  Nucleic Acid
ccaggcugggaggcccg

SEQ ID NO: 2768 - RNA, 17 nt, Artificial Sequence
  Description of Artificial Sequence:  Nucleic Acid
caggcugggaggcccga

SEQ ID NO: 2769 - RNA, 17 nt, Artificial Sequence
  Description of Artificial Sequence:  Nucleic Acid
ggcugggaggcccgagg

SEQ ID NO: 2770 - RNA, 17 nt, Artificial Sequence
  Description of Artificial Sequence:  Nucleic Acid
ggaggcccgaggcuccu

SEQ ID NO: 2771 - RNA, 17 nt, Artificial Sequence
  Description of Artificial Sequence:  Nucleic Acid
aggcccgaggcuccuuu

SEQ ID NO: 2772 - RNA, 17 nt, Artificial Sequence
  Description of Artificial Sequence:  Nucleic Acid
cgcaagcugaugugcac

SEQ ID NO: 2773 - RNA, 17 nt, Artificial Sequence
  Description of Artificial Sequence:  Nucleic Acid
ugugcaccgacaagugg

SEQ ID NO: 2774 - RNA, 17 nt, Artificial Sequence
  Description of Artificial Sequence:  Nucleic Acid
cgacaaguggccauugu

SEQ ID NO: 2775 - RNA, 17 nt, Artificial Sequence
  Description of Artificial Sequence:  Nucleic Acid
uguguuccggaccccuc

SEQ ID NO: 2776 - RNA, 17 nt, Artificial Sequence
  Description of Artificial Sequence:  Nucleic Acid
guguuccggaccccucc

SEQ ID NO: 2777 - RNA, 17 nt, Artificial Sequence
  Description of Artificial Sequence:  Nucleic Acid
ccuacgcagaccccagc

SEQ ID NO: 2778 - RNA, 17 nt, Artificial Sequence
  Description of Artificial Sequence:  Nucleic Acid
agccugcaggcuccugu

SEQ ID NO: 2779 - RNA, 17 nt, Artificial Sequence
  Description of Artificial Sequence:  Nucleic Acid
gcagcugcggcggccuu

SEQ ID NO: 2780 - RNA, 17 nt, Artificial Sequence
  Description of Artificial Sequence:  Nucleic Acid
gcugcggcggccuuccg

SEQ ID NO: 2781 - RNA, 17 nt, Artificial Sequence
  Description of Artificial Sequence:  Nucleic Acid
ggccuuccgaccgggag

SEQ ID NO: 2782 - RNA, 17 nt, Artificial Sequence
  Description of Artificial Sequence:  Nucleic Acid
uuccgaccgggagcuca

SEQ ID NO: 2783 - RNA, 17 nt, Artificial Sequence
  Description of Artificial Sequence:  Nucleic Acid
uccgaccgggagcucag

SEQ ID NO: 2784 - RNA, 17 nt, Artificial Sequence
  Description of Artificial Sequence:  Nucleic Acid
ccgaccgggagcucagu

SEQ ID NO: 2785 - RNA, 17 nt, Artificial Sequence
  Description of Artificial Sequence:  Nucleic Acid
agcucagugagcccaug

SEQ ID NO: 2786 - RNA, 17 nt, Artificial Sequence
  Description of Artificial Sequence:  Nucleic Acid
gagcccauggaauucca

SEQ ID NO: 2787 - RNA, 17 nt, Artificial Sequence
  Description of Artificial Sequence:  Nucleic Acid
agcccauggaauuccag

SEQ ID NO: 2788 - RNA, 17 nt, Artificial Sequence
  Description of Artificial Sequence:  Nucleic Acid
accugccagauacagac

SEQ ID NO: 2789 - RNA, 17 nt, Artificial Sequence
  Description of Artificial Sequence:  Nucleic Acid
cagauacagacgaucgu

SEQ ID NO: 2790 - RNA, 17 nt, Artificial Sequence
  Description of Artificial Sequence:  Nucleic Acid
auacagacgaucgucac

SEQ ID NO: 2791 - RNA, 17 nt, Artificial Sequence
  Description of Artificial Sequence:  Nucleic Acid
ucgucaccggauugagg

SEQ ID NO: 2792 - RNA, 17 nt, Artificial Sequence
  Description of Artificial Sequence:  Nucleic Acid
cgucaccggauugagga

SEQ ID NO: 2793 - RNA, 17 nt, Artificial Sequence
  Description of Artificial Sequence:  Nucleic Acid
accggauugaggagaaa

SEQ ID NO: 2794 - RNA, 17 nt, Artificial Sequence
  Description of Artificial Sequence:  Nucleic Acid
cggauugaggagaaacg

SEQ ID NO: 2795 - RNA, 17 nt, Artificial Sequence
  Description of Artificial Sequence:  Nucleic Acid
ggauugaggagaaacgu

SEQ ID NO: 2796 - RNA, 17 nt, Artificial Sequence
  Description of Artificial Sequence:  Nucleic Acid
auugaggagaaacguaa

SEQ ID NO: 2797 - RNA, 17 nt, Artificial Sequence
  Description of Artificial Sequence:  Nucleic Acid
acguaaaaggacauaug

SEQ ID NO: 2798 - RNA, 17 nt, Artificial Sequence
  Description of Artificial Sequence:  Nucleic Acid
cguaaaaggacauauga

SEQ ID NO: 2799 - RNA, 17 nt, Artificial Sequence
  Description of Artificial Sequence:  Nucleic Acid
ggacauaugagaccuuc

SEQ ID NO: 2800 - RNA, 17 nt, Artificial Sequence
  Description of Artificial Sequence:  Nucleic Acid
acauaugagaccuucaa

SEQ ID NO: 2801 - RNA, 17 nt, Artificial Sequence
  Description of Artificial Sequence:  Nucleic Acid
accuucaagagcaucau

SEQ ID NO: 2802 - RNA, 17 nt, Artificial Sequence
  Description of Artificial Sequence:  Nucleic Acid
agcaucaugaagaagag

SEQ ID NO: 2803 - RNA, 17 nt, Artificial Sequence
  Description of Artificial Sequence:  Nucleic Acid
aucaugaagaagagucc

SEQ ID NO: 2804 - RNA, 17 nt, Artificial Sequence
  Description of Artificial Sequence:  Nucleic Acid
augaagaagaguccuuu

SEQ ID NO: 2805 - RNA, 17 nt, Artificial Sequence
  Description of Artificial Sequence:  Nucleic Acid
cuuucagcggacccacc

SEQ ID NO: 2806 - RNA, 17 nt, Artificial Sequence
  Description of Artificial Sequence:  Nucleic Acid
uuucagcggacccaccg

SEQ ID NO: 2807 - RNA, 17 nt, Artificial Sequence
  Description of Artificial Sequence:  Nucleic Acid
gacccaccgacccccgg

SEQ ID NO: 2808 - RNA, 17 nt, Artificial Sequence
  Description of Artificial Sequence:  Nucleic Acid
cgacccccggccuccac

SEQ ID NO: 2809 - RNA, 17 nt, Artificial Sequence
  Description of Artificial Sequence:  Nucleic Acid
uccaccucgacgcauug

SEQ ID NO: 2810 - RNA, 17 nt, Artificial Sequence
  Description of Artificial Sequence:  Nucleic Acid
ucaucccugagcaccau

SEQ ID NO: 2811 - RNA, 17 nt, Artificial Sequence
  Description of Artificial Sequence:  Nucleic Acid
ucaacuaugaugaguuu

SEQ ID NO: 2812 - RNA, 17 nt, Artificial Sequence
  Description of Artificial Sequence:  Nucleic Acid
acuaugaugaguuuccc

SEQ ID NO: 2813 - RNA, 17 nt, Artificial Sequence
  Description of Artificial Sequence:  Nucleic Acid
cccaccaugguguuucc

SEQ ID NO: 2814 - RNA, 17 nt, Artificial Sequence
  Description of Artificial Sequence:  Nucleic Acid
uuccuucugggcagauc

SEQ ID NO: 2815 - RNA, 17 nt, Artificial Sequence
  Description of Artificial Sequence:  Nucleic Acid
uccuucugggcagauca

SEQ ID NO: 2816 - RNA, 17 nt, Artificial Sequence
  Description of Artificial Sequence:  Nucleic Acid
ucugggcagaucagcca

SEQ ID NO: 2817 - RNA, 17 nt, Artificial Sequence
  Description of Artificial Sequence:  Nucleic Acid
aucagccaggccucggc

SEQ ID NO: 2818 - RNA, 17 nt, Artificial Sequence
  Description of Artificial Sequence:  Nucleic Acid
caggccucggccuuggc

SEQ ID NO: 2819 - RNA, 17 nt, Artificial Sequence
  Description of Artificial Sequence:  Nucleic Acid
ucggccuuggccccggc

SEQ ID NO: 2820 - RNA, 17 nt, Artificial Sequence
  Description of Artificial Sequence:  Nucleic Acid
uuggccccggccccucc

SEQ ID NO: 2821 - RNA, 17 nt, Artificial Sequence
  Description of Artificial Sequence:  Nucleic Acid
cugccccaggcuccagc

SEQ ID NO: 2822 - RNA, 17 nt, Artificial Sequence
  Description of Artificial Sequence:  Nucleic Acid
ccagccaugguaucagc

SEQ ID NO: 2823 - RNA, 17 nt, Artificial Sequence
  Description of Artificial Sequence:  Nucleic Acid
ucagcucuggcccaggc

SEQ ID NO: 2824 - RNA, 17 nt, Artificial Sequence
  Description of Artificial Sequence:  Nucleic Acid
cuggcccaggccccagc

SEQ ID NO: 2825 - RNA, 17 nt, Artificial Sequence
  Description of Artificial Sequence:  Nucleic Acid
uagccccaggcccuccu

SEQ ID NO: 2826 - RNA, 17 nt, Artificial Sequence
  Description of Artificial Sequence:  Nucleic Acid
ccuccucaggcuguggc

SEQ ID NO: 2827 - RNA, 17 nt, Artificial Sequence
  Description of Artificial Sequence:  Nucleic Acid
caggcuguggccccacc

SEQ ID NO: 2828 - RNA, 17 nt, Artificial Sequence
  Description of Artificial Sequence:  Nucleic Acid
cccacccaggcugggga

SEQ ID NO: 2829 - RNA, 17 nt, Artificial Sequence
  Description of Artificial Sequence:  Nucleic Acid
cccaggcuggggaagga

SEQ ID NO: 2830 - RNA, 17 nt, Artificial Sequence
  Description of Artificial Sequence:  Nucleic Acid
ccaggcuggggaaggaa

SEQ ID NO: 2831 - RNA, 17 nt, Artificial Sequence
  Description of Artificial Sequence:  Nucleic Acid
caggcuggggaaggaac

SEQ ID NO: 2832 - RNA, 17 nt, Artificial Sequence
  Description of Artificial Sequence:  Nucleic Acid
aggcuggggaaggaacg

SEQ ID NO: 2833 - RNA, 17 nt, Artificial Sequence
  Description of Artificial Sequence:  Nucleic Acid
cuggggaaggaacgcug

SEQ ID NO: 2834 - RNA, 17 nt, Artificial Sequence
  Description of Artificial Sequence:  Nucleic Acid
uggggaaggaacgcugu

SEQ ID NO: 2835 - RNA, 17 nt, Artificial Sequence
  Description of Artificial Sequence:  Nucleic Acid
cgcugucagaggcccug

SEQ ID NO: 2836 - RNA, 17 nt, Artificial Sequence
  Description of Artificial Sequence:  Nucleic Acid
cugucagaggcccugcu

SEQ ID NO: 2837 - RNA, 17 nt, Artificial Sequence
  Description of Artificial Sequence:  Nucleic Acid
ugcaguuugaugaugaa

SEQ ID NO: 2838 - RNA, 17 nt, Artificial Sequence
  Description of Artificial Sequence:  Nucleic Acid
aguuugaugaugaagac

SEQ ID NO: 2839 - RNA, 17 nt, Artificial Sequence
  Description of Artificial Sequence:  Nucleic Acid
uugaugaugaagaccug

SEQ ID NO: 2840 - RNA, 17 nt, Artificial Sequence
  Description of Artificial Sequence:  Nucleic Acid
augaugaagaccugggg

SEQ ID NO: 2841 - RNA, 17 nt, Artificial Sequence
  Description of Artificial Sequence:  Nucleic Acid
gaagaccugggggccuu

SEQ ID NO: 2842 - RNA, 17 nt, Artificial Sequence
  Description of Artificial Sequence:  Nucleic Acid
aagaccugggggccuug

SEQ ID NO: 2843 - RNA, 17 nt, Artificial Sequence
  Description of Artificial Sequence:  Nucleic Acid
agaccugggggccuugc

SEQ ID NO: 2844 - RNA, 17 nt, Artificial Sequence
  Description of Artificial Sequence:  Nucleic Acid
gaccugggggccuugcu

SEQ ID NO: 2845 - RNA, 17 nt, Artificial Sequence
  Description of Artificial Sequence:  Nucleic Acid
ccuugcuuggcaacagc

SEQ ID NO: 2846 - RNA, 17 nt, Artificial Sequence
  Description of Artificial Sequence:  Nucleic Acid
acagcacagacccagcu

SEQ ID NO: 2847 - RNA, 17 nt, Artificial Sequence
  Description of Artificial Sequence:  Nucleic Acid
uguucacagaccuggca

SEQ ID NO: 2848 - RNA, 17 nt, Artificial Sequence
  Description of Artificial Sequence:  Nucleic Acid
acagaccuggcauccgu

SEQ ID NO: 2849 - RNA, 17 nt, Artificial Sequence
  Description of Artificial Sequence:  Nucleic Acid
cauccgucgacaacucc

SEQ ID NO: 2850 - RNA, 17 nt, Artificial Sequence
  Description of Artificial Sequence:  Nucleic Acid
acaacuccgaguuucag

SEQ ID NO: 2851 - RNA, 17 nt, Artificial Sequence
  Description of Artificial Sequence:  Nucleic Acid
cagcugcugaaccaggg

SEQ ID NO: 2852 - RNA, 17 nt, Artificial Sequence
  Description of Artificial Sequence:  Nucleic Acid
cugaaccagggcauacc

SEQ ID NO: 2853 - RNA, 17 nt, Artificial Sequence
  Description of Artificial Sequence:  Nucleic Acid
ugaaccagggcauaccu

SEQ ID NO: 2854 - RNA, 17 nt, Artificial Sequence
  Description of Artificial Sequence:  Nucleic Acid
auaccuguggcccccca

SEQ ID NO: 2855 - RNA, 17 nt, Artificial Sequence
  Description of Artificial Sequence:  Nucleic Acid
acacaacugagcccaug

SEQ ID NO: 2856 - RNA, 17 nt, Artificial Sequence
  Description of Artificial Sequence:  Nucleic Acid
cccaugcugauggagua

SEQ ID NO: 2857 - RNA, 17 nt, Artificial Sequence
  Description of Artificial Sequence:  Nucleic Acid
augcugauggaguaccc

SEQ ID NO: 2858 - RNA, 17 nt, Artificial Sequence
  Description of Artificial Sequence:  Nucleic Acid
ugcugauggaguacccu

SEQ ID NO: 2859 - RNA, 17 nt, Artificial Sequence
  Description of Artificial Sequence:  Nucleic Acid
aguacccugaggcuaua

SEQ ID NO: 2860 - RNA, 17 nt, Artificial Sequence
  Description of Artificial Sequence:  Nucleic Acid
uacccugaggcuauaac

SEQ ID NO: 2861 - RNA, 17 nt, Artificial Sequence
  Description of Artificial Sequence:  Nucleic Acid
cgccuagugacagccca

SEQ ID NO: 2862 - RNA, 17 nt, Artificial Sequence
  Description of Artificial Sequence:  Nucleic Acid
acagcccagaggccccc

SEQ ID NO: 2863 - RNA, 17 nt, Artificial Sequence
  Description of Artificial Sequence:  Nucleic Acid
agcccagaggccccccg

SEQ ID NO: 2864 - RNA, 17 nt, Artificial Sequence
  Description of Artificial Sequence:  Nucleic Acid
ggccccccgacccagcu

SEQ ID NO: 2865 - RNA, 17 nt, Artificial Sequence
  Description of Artificial Sequence:  Nucleic Acid
gcuccacugggggcccc

SEQ ID NO: 2866 - RNA, 17 nt, Artificial Sequence
  Description of Artificial Sequence:  Nucleic Acid
cuccacugggggccccg

SEQ ID NO: 2867 - RNA, 17 nt, Artificial Sequence
  Description of Artificial Sequence:  Nucleic Acid
uccacugggggccccgg

SEQ ID NO: 2868 - RNA, 17 nt, Artificial Sequence
  Description of Artificial Sequence:  Nucleic Acid
ccacugggggccccggg

SEQ ID NO: 2869 - RNA, 17 nt, Artificial Sequence
  Description of Artificial Sequence:  Nucleic Acid
ggggccccggggcuccc

SEQ ID NO: 2870 - RNA, 17 nt, Artificial Sequence
  Description of Artificial Sequence:  Nucleic Acid
gggccccggggcucccc

SEQ ID NO: 2871 - RNA, 17 nt, Artificial Sequence
  Description of Artificial Sequence:  Nucleic Acid
ggccccggggcucccca

SEQ ID NO: 2872 - RNA, 17 nt, Artificial Sequence
  Description of Artificial Sequence:  Nucleic Acid
uccccaauggccuccuu

SEQ ID NO: 2873 - RNA, 17 nt, Artificial Sequence
  Description of Artificial Sequence:  Nucleic Acid
uccuuucaggagaugaa

SEQ ID NO: 2874 - RNA, 17 nt, Artificial Sequence
  Description of Artificial Sequence:  Nucleic Acid
ccuuucaggagaugaag

SEQ ID NO: 2875 - RNA, 17 nt, Artificial Sequence
  Description of Artificial Sequence:  Nucleic Acid
uuucaggagaugaagac

SEQ ID NO: 2876 - RNA, 17 nt, Artificial Sequence
  Description of Artificial Sequence:  Nucleic Acid
caggagaugaagacuuc

SEQ ID NO: 2877 - RNA, 17 nt, Artificial Sequence
  Description of Artificial Sequence:  Nucleic Acid
gagaugaagacuucucc

SEQ ID NO: 2878 - RNA, 17 nt, Artificial Sequence
  Description of Artificial Sequence:  Nucleic Acid
uccauugcggacaugga

SEQ ID NO: 2879 - RNA, 17 nt, Artificial Sequence
  Description of Artificial Sequence:  Nucleic Acid
ccauugcggacauggac

SEQ ID NO: 2880 - RNA, 17 nt, Artificial Sequence
  Description of Artificial Sequence:  Nucleic Acid
gcggacauggacuucuc

SEQ ID NO: 2881 - RNA, 17 nt, Artificial Sequence
  Description of Artificial Sequence:  Nucleic Acid
cggacauggacuucuca

SEQ ID NO: 2882 - RNA, 17 nt, Artificial Sequence
  Description of Artificial Sequence:  Nucleic Acid
gcccugcugagucagau

SEQ ID NO: 2883 - RNA, 17 nt, Artificial Sequence
  Description of Artificial Sequence:  Nucleic Acid
cugagucagaucagcuc

SEQ ID NO: 2884 - RNA, 17 nt, Artificial Sequence
  Description of Artificial Sequence:  Nucleic Acid
gcuccuaagggggugac

SEQ ID NO: 2885 - RNA, 17 nt, Artificial Sequence
  Description of Artificial Sequence:  Nucleic Acid
cuccuaagggggugacg

SEQ ID NO: 2886 - RNA, 17 nt, Artificial Sequence
  Description of Artificial Sequence:  Nucleic Acid
uccuaagggggugacgc

SEQ ID NO: 2887 - RNA, 17 nt, Artificial Sequence
  Description of Artificial Sequence:  Nucleic Acid
ccuaagggggugacgcc

SEQ ID NO: 2888 - RNA, 17 nt, Artificial Sequence
  Description of Artificial Sequence:  Nucleic Acid
aagggggugacgccugc

SEQ ID NO: 2889 - RNA, 17 nt, Artificial Sequence
  Description of Artificial Sequence:  Nucleic Acid
ccuccccagagcacugg

SEQ ID NO: 2890 - RNA, 17 nt, Artificial Sequence
  Description of Artificial Sequence:  Nucleic Acid
agagcacugguugcagg

SEQ ID NO: 2891 - RNA, 17 nt, Artificial Sequence
  Description of Artificial Sequence:  Nucleic Acid
ugguugcaggggauuga

SEQ ID NO: 2892 - RNA, 17 nt, Artificial Sequence
  Description of Artificial Sequence:  Nucleic Acid
gguugcaggggauugaa

SEQ ID NO: 2893 - RNA, 17 nt, Artificial Sequence
  Description of Artificial Sequence:  Nucleic Acid
guugcaggggauugaag

SEQ ID NO: 2894 - RNA, 17 nt, Artificial Sequence
  Description of Artificial Sequence:  Nucleic Acid
uugcaggggauugaagc

SEQ ID NO: 2895 - RNA, 17 nt, Artificial Sequence
  Description of Artificial Sequence:  Nucleic Acid
aggggauugaagcccuc

SEQ ID NO: 2896 - RNA, 17 nt, Artificial Sequence
  Description of Artificial Sequence:  Nucleic Acid
gcacuuacggauucugg

SEQ ID NO: 2897 - RNA, 17 nt, Artificial Sequence
  Description of Artificial Sequence:  Nucleic Acid
cacuuacggauucuggu

SEQ ID NO: 2898 - RNA, 17 nt, Artificial Sequence
  Description of Artificial Sequence:  Nucleic Acid
cggauucugguggggug

SEQ ID NO: 2899 - RNA, 17 nt, Artificial Sequence
  Description of Artificial Sequence:  Nucleic Acid
auucugguggggugugu

SEQ ID NO: 2900 - RNA, 17 nt, Artificial Sequence
  Description of Artificial Sequence:  Nucleic Acid
uucuggugggguguguu

SEQ ID NO: 2901 - RNA, 17 nt, Artificial Sequence
  Description of Artificial Sequence:  Nucleic Acid
ucuggugggguguguuc

SEQ ID NO: 2902 - RNA, 17 nt, Artificial Sequence
  Description of Artificial Sequence:  Nucleic Acid
aacuuuguggaugucuu

SEQ ID NO: 2903 - RNA, 17 nt, Artificial Sequence
  Description of Artificial Sequence:  Nucleic Acid
acuuuguggaugucuuc

SEQ ID NO: 2904 - RNA, 17 nt, Artificial Sequence
  Description of Artificial Sequence:  Nucleic Acid
ucuuccuuggagggggg

SEQ ID NO: 2905 - RNA, 17 nt, Artificial Sequence
  Description of Artificial Sequence:  Nucleic Acid
cuuccuuggagggggga

SEQ ID NO: 2906 - RNA, 17 nt, Artificial Sequence
  Description of Artificial Sequence:  Nucleic Acid
uccuuggaggggggagc

SEQ ID NO: 2907 - RNA, 17 nt, Artificial Sequence
  Description of Artificial Sequence:  Nucleic Acid
ccuuggaggggggagcc

SEQ ID NO: 2908 - RNA, 17 nt, Artificial Sequence
  Description of Artificial Sequence:  Nucleic Acid
cuuggaggggggagcca

SEQ ID NO: 2909 - RNA, 17 nt, Artificial Sequence
  Description of Artificial Sequence:  Nucleic Acid
uuggaggggggagccau

SEQ ID NO: 2910 - RNA, 17 nt, Artificial Sequence
  Description of Artificial Sequence:  Nucleic Acid
uggaggggggagccaua

SEQ ID NO: 2911 - RNA, 17 nt, Artificial Sequence
  Description of Artificial Sequence:  Nucleic Acid
ggaggggggagccauau

SEQ ID NO: 2912 - RNA, 17 nt, Artificial Sequence
  Description of Artificial Sequence:  Nucleic Acid
cucuuuuuggaggugcu

SEQ ID NO: 2913 - RNA, 17 nt, Artificial Sequence
  Description of Artificial Sequence:  Nucleic Acid
ucuuuuuggaggugcuu

SEQ ID NO: 2914 - RNA, 17 nt, Artificial Sequence
  Description of Artificial Sequence:  Nucleic Acid
uuuuuggaggugcuuaa

SEQ ID NO: 2915 - RNA, 17 nt, Artificial Sequence
  Description of Artificial Sequence:  Nucleic Acid
cuuaagcagaagcauua

SEQ ID NO: 2916 - RNA, 17 nt, Artificial Sequence
  Description of Artificial Sequence:  Nucleic Acid
acuucucuggaaagggg

SEQ ID NO: 2917 - RNA, 17 nt, Artificial Sequence
  Description of Artificial Sequence:  Nucleic Acid
cuucucuggaaaggggg

SEQ ID NO: 2918 - RNA, 17 nt, Artificial Sequence
  Description of Artificial Sequence:  Nucleic Acid
ucuggaaaggggggagc

SEQ ID NO: 2919 - RNA, 17 nt, Artificial Sequence
  Description of Artificial Sequence:  Nucleic Acid
cuggaaaggggggagcu

SEQ ID NO: 2920 - RNA, 17 nt, Artificial Sequence
  Description of Artificial Sequence:  Nucleic Acid
uggaaaggggggagcug

SEQ ID NO: 2921 - RNA, 17 nt, Artificial Sequence
  Description of Artificial Sequence:  Nucleic Acid
ggaaaggggggagcugg

SEQ ID NO: 2922 - RNA, 17 nt, Artificial Sequence
  Description of Artificial Sequence:  Nucleic Acid
gaaaggggggagcuggg

SEQ ID NO: 2923 - RNA, 17 nt, Artificial Sequence
  Description of Artificial Sequence:  Nucleic Acid
aaaggggggagcugggg

SEQ ID NO: 2924 - RNA, 17 nt, Artificial Sequence
  Description of Artificial Sequence:  Nucleic Acid
ggggagcuggggaaacu

SEQ ID NO: 2925 - RNA, 17 nt, Artificial Sequence
  Description of Artificial Sequence:  Nucleic Acid
gggagcuggggaaacuc

SEQ ID NO: 2926 - RNA, 17 nt, Artificial Sequence
  Description of Artificial Sequence:  Nucleic Acid
ggagcuggggaaacuca

SEQ ID NO: 2927 - RNA, 17 nt, Artificial Sequence
  Description of Artificial Sequence:  Nucleic Acid
gagcuggggaaacucaa

SEQ ID NO: 2928 - RNA, 17 nt, Artificial Sequence
  Description of Artificial Sequence:  Nucleic Acid
ccuguccugauggucag

SEQ ID NO: 2929 - RNA, 17 nt, Artificial Sequence
  Description of Artificial Sequence:  Nucleic Acid
guccugauggucagcuc

SEQ ID NO: 2930 - RNA, 17 nt, Artificial Sequence
  Description of Artificial Sequence:  Nucleic Acid
ucucuguagggaacugu

SEQ ID NO: 2931 - RNA, 17 nt, Artificial Sequence
  Description of Artificial Sequence:  Nucleic Acid
cucuguagggaacugug

SEQ ID NO: 2932 - RNA, 17 nt, Artificial Sequence
  Description of Artificial Sequence:  Nucleic Acid
ucuguagggaacugugg

SEQ ID NO: 2933 - RNA, 17 nt, Artificial Sequence
  Description of Artificial Sequence:  Nucleic Acid
ggaacuguggggucccc

SEQ ID NO: 2934 - RNA, 17 nt, Artificial Sequence
  Description of Artificial Sequence:  Nucleic Acid
gaacugugggguccccc

SEQ ID NO: 2935 - RNA, 17 nt, Artificial Sequence
  Description of Artificial Sequence:  Nucleic Acid
aacugugggguccccca

SEQ ID NO: 2936 - RNA, 17 nt, Artificial Sequence
  Description of Artificial Sequence:  Nucleic Acid
cagcuucugguacucuc

SEQ ID NO: 2937 - RNA, 17 nt, Artificial Sequence
  Description of Artificial Sequence:  Nucleic Acid
cucuccuagagacagaa

SEQ ID NO: 2938 - RNA, 17 nt, Artificial Sequence
  Description of Artificial Sequence:  Nucleic Acid
cuccuagagacagaagc

SEQ ID NO: 2939 - RNA, 17 nt, Artificial Sequence
  Description of Artificial Sequence:  Nucleic Acid
uagagacagaagcaggc

SEQ ID NO: 2940 - RNA, 17 nt, Artificial Sequence
  Description of Artificial Sequence:  Nucleic Acid
cagaagcaggcuggagg

SEQ ID NO: 2941 - RNA, 17 nt, Artificial Sequence
  Description of Artificial Sequence:  Nucleic Acid
agcaggcuggagguaag

SEQ ID NO: 2942 - RNA, 17 nt, Artificial Sequence
  Description of Artificial Sequence:  Nucleic Acid
gcaggcuggagguaagg

SEQ ID NO: 2943 - RNA, 17 nt, Artificial Sequence
  Description of Artificial Sequence:  Nucleic Acid
aggcuggagguaaggcc

SEQ ID NO: 2944 - RNA, 17 nt, Artificial Sequence
  Description of Artificial Sequence:  Nucleic Acid
ggagguaaggccuuuga

SEQ ID NO: 2945 - RNA, 17 nt, Artificial Sequence
  Description of Artificial Sequence:  Nucleic Acid
aggccuuugagcccaca

SEQ ID NO: 2946 - RNA, 17 nt, Artificial Sequence
  Description of Artificial Sequence:  Nucleic Acid
uccaucauggauucauu

SEQ ID NO: 2947 - RNA, 17 nt, Artificial Sequence
  Description of Artificial Sequence:  Nucleic Acid
ccaucauggauucauua

SEQ ID NO: 2948 - RNA, 17 nt, Artificial Sequence
  Description of Artificial Sequence:  Nucleic Acid
acgccccagauaccagc

SEQ ID NO: 2949 - RNA, 17 nt, Artificial Sequence
  Description of Artificial Sequence:  Nucleic Acid
cccuguauggcacuggc

SEQ ID NO: 2950 - RNA, 17 nt, Artificial Sequence
  Description of Artificial Sequence:  Nucleic Acid
auggcacuggcauuguc

SEQ ID NO: 2951 - RNA, 17 nt, Artificial Sequence
  Description of Artificial Sequence:  Nucleic Acid
cagcguuugaggggcug

SEQ ID NO: 2952 - RNA, 17 nt, Artificial Sequence
  Description of Artificial Sequence:  Nucleic Acid
gcguuugaggggcugcc

SEQ ID NO: 2953 - RNA, 17 nt, Artificial Sequence
  Description of Artificial Sequence:  Nucleic Acid
cguuugaggggcugccu

SEQ ID NO: 2954 - RNA, 17 nt, Artificial Sequence
  Description of Artificial Sequence:  Nucleic Acid
guuugaggggcugccuu

SEQ ID NO: 2955 - RNA, 17 nt, Artificial Sequence
  Description of Artificial Sequence:  Nucleic Acid
gcccuacagaggucucu

SEQ ID NO: 2956 - RNA, 17 nt, Artificial Sequence
  Description of Artificial Sequence:  Nucleic Acid
ccuacagaggucucugc

SEQ ID NO: 2957 - RNA, 17 nt, Artificial Sequence
  Description of Artificial Sequence:  Nucleic Acid
ucucugccggcucuuuc

SEQ ID NO: 2958 - RNA, 17 nt, Artificial Sequence
  Description of Artificial Sequence:  Nucleic Acid
ucaaccauggcugaagg

SEQ ID NO: 2959 - RNA, 17 nt, Artificial Sequence
  Description of Artificial Sequence:  Nucleic Acid
ccauggcugaaggaaac

SEQ ID NO: 2960 - RNA, 17 nt, Artificial Sequence
  Description of Artificial Sequence:  Nucleic Acid
uggcugaaggaaacagu

SEQ ID NO: 2961 - RNA, 17 nt, Artificial Sequence
  Description of Artificial Sequence:  Nucleic Acid
ggcugaaggaaacagug

SEQ ID NO: 2962 - RNA, 17 nt, Artificial Sequence
  Description of Artificial Sequence:  Nucleic Acid
acagcacuggcucucuc

SEQ ID NO: 2963 - RNA, 17 nt, Artificial Sequence
  Description of Artificial Sequence:  Nucleic Acid
ucucuccaggauccaga

SEQ ID NO: 2964 - RNA, 17 nt, Artificial Sequence
  Description of Artificial Sequence:  Nucleic Acid
cucuccaggauccagaa

SEQ ID NO: 2965 - RNA, 17 nt, Artificial Sequence
  Description of Artificial Sequence:  Nucleic Acid
aggauccagaagggguu

SEQ ID NO: 2966 - RNA, 17 nt, Artificial Sequence
  Description of Artificial Sequence:  Nucleic Acid
auccagaagggguuugg

SEQ ID NO: 2967 - RNA, 17 nt, Artificial Sequence
  Description of Artificial Sequence:  Nucleic Acid
uccagaagggguuuggu

SEQ ID NO: 2968 - RNA, 17 nt, Artificial Sequence
  Description of Artificial Sequence:  Nucleic Acid
ccagaagggguuugguc

SEQ ID NO: 2969 - RNA, 17 nt, Artificial Sequence
  Description of Artificial Sequence:  Nucleic Acid
agggguuuggucuggac

SEQ ID NO: 2970 - RNA, 17 nt, Artificial Sequence
  Description of Artificial Sequence:  Nucleic Acid
uuuggucuggacuuccu

SEQ ID NO: 2971 - RNA, 17 nt, Artificial Sequence
  Description of Artificial Sequence:  Nucleic Acid
uuggucuggacuuccuu

SEQ ID NO: 2972 - RNA, 17 nt, Artificial Sequence
  Description of Artificial Sequence:  Nucleic Acid
uaauaguaggguaaguu

SEQ ID NO: 2973 - RNA, 17 nt, Artificial Sequence
  Description of Artificial Sequence:  Nucleic Acid
aauaguaggguaaguug

SEQ ID NO: 2974 - RNA, 17 nt, Artificial Sequence
  Description of Artificial Sequence:  Nucleic Acid
guuguuaagaguggggg

SEQ ID NO: 2975 - RNA, 17 nt, Artificial Sequence
  Description of Artificial Sequence:  Nucleic Acid
uuaagagugggggagag

SEQ ID NO: 2976 - RNA, 17 nt, Artificial Sequence
  Description of Artificial Sequence:  Nucleic Acid
uaagagugggggagagc

SEQ ID NO: 2977 - RNA, 17 nt, Artificial Sequence
  Description of Artificial Sequence:  Nucleic Acid
aagagugggggagagca

SEQ ID NO: 2978 - RNA, 17 nt, Artificial Sequence
  Description of Artificial Sequence:  Nucleic Acid
agagugggggagagcag

SEQ ID NO: 2979 - RNA, 17 nt, Artificial Sequence
  Description of Artificial Sequence:  Nucleic Acid
gagugggggagagcagg

SEQ ID NO: 2980 - RNA, 17 nt, Artificial Sequence
  Description of Artificial Sequence:  Nucleic Acid
gugggggagagcaggcu

SEQ ID NO: 2981 - RNA, 17 nt, Artificial Sequence
  Description of Artificial Sequence:  Nucleic Acid
ggagagcaggcuggcag

SEQ ID NO: 2982 - RNA, 17 nt, Artificial Sequence
  Description of Artificial Sequence:  Nucleic Acid
agcaggcuggcagcucu

SEQ ID NO: 2983 - RNA, 17 nt, Artificial Sequence
  Description of Artificial Sequence:  Nucleic Acid
uccagucaggaggcaua

SEQ ID NO: 2984 - RNA, 17 nt, Artificial Sequence
  Description of Artificial Sequence:  Nucleic Acid
ccagucaggaggcauag

SEQ ID NO: 2985 - RNA, 17 nt, Artificial Sequence
  Description of Artificial Sequence:  Nucleic Acid
agucaggaggcauaguu

SEQ ID NO: 2986 - RNA, 17 nt, Artificial Sequence
  Description of Artificial Sequence:  Nucleic Acid
uuuuuagugaacaauca

SEQ ID NO: 2987 - RNA, 17 nt, Artificial Sequence
  Description of Artificial Sequence:  Nucleic Acid
aagcacuuggacucuug

SEQ ID NO: 2988 - RNA, 17 nt, Artificial Sequence
  Description of Artificial Sequence:  Nucleic Acid
agcacuuggacucuugc

SEQ ID NO: 2989 - RNA, 17 nt, Artificial Sequence
  Description of Artificial Sequence:  Nucleic Acid
ucuacucugaacuaaua

SEQ ID NO: 2990 - RNA, 17 nt, Artificial Sequence
  Description of Artificial Sequence:  Nucleic Acid
gccaagcuggacggcac

SEQ ID NO: 2991 - RNA, 17 nt, Artificial Sequence
  Description of Artificial Sequence:  Nucleic Acid
ccaagcuggacggcacg

SEQ ID NO: 2992 - RNA, 17 nt, Artificial Sequence
  Description of Artificial Sequence:  Nucleic Acid
agcuggacggcacgagc

SEQ ID NO: 2993 - RNA, 17 nt, Artificial Sequence
  Description of Artificial Sequence:  Nucleic Acid
gacggcacgagcucgug

SEQ ID NO: 2994 - RNA, 48 nt, Artificial Sequence
  Description of Artificial Sequence:  Nucleic Acid
cggccccgggaggaaacucccuucaaggacaucguccgggcucgugcc

SEQ ID NO: 2995 - RNA, 48 nt, Artificial Sequence
  Description of Artificial Sequence:  Nucleic Acid
cccggcccggaggaaacucccuucaaggacaucguccggggccucgug

SEQ ID NO: 2996 - RNA, 48 nt, Artificial Sequence
  Description of Artificial Sequence:  Nucleic Acid
acccggccggaggaaacucccuucaaggacaucguccgggcgccucgu

SEQ ID NO: 2997 - RNA, 48 nt, Artificial Sequence
  Description of Artificial Sequence:  Nucleic Acid
gacccggcggaggaaacucccuucaaggacaucguccgggccgccucg

SEQ ID NO: 2998 - RNA, 48 nt, Artificial Sequence
  Description of Artificial Sequence:  Nucleic Acid
cgacccggggaggaaacucccuucaaggacaucguccgggcccgccuc

SEQ ID NO: 2999 - RNA, 48 nt, Artificial Sequence
  Description of Artificial Sequence:  Nucleic Acid
cugcgaccggaggaaacucccuucaaggacaucguccgggggccccgc

SEQ ID NO: 3000 - RNA, 48 nt, Artificial Sequence
  Description of Artificial Sequence:  Nucleic Acid
gcugcgacggaggaaacucccuucaaggacaucguccgggcggccccg

SEQ ID NO: 3001 - RNA, 48 nt, Artificial Sequence
  Description of Artificial Sequence:  Nucleic Acid
agcugcgaggaggaaacucccuucaaggacaucguccgggccggcccc

SEQ ID NO: 3002 - RNA, 48 nt, Artificial Sequence
  Description of Artificial Sequence:  Nucleic Acid
cccagcugggaggaaacucccuucaaggacaucguccggggacccggc

SEQ ID NO: 3003 - RNA, 48 nt, Artificial Sequence
  Description of Artificial Sequence:  Nucleic Acid
gggcccagggaggaaacucccuucaaggacaucguccgggugcgaccc

SEQ ID NO: 3004 - RNA, 48 nt, Artificial Sequence
  Description of Artificial Sequence:  Nucleic Acid
cgcgggccggaggaaacucccuucaaggacaucguccgggagcugcga

SEQ ID NO: 3005 - RNA, 48 nt, Artificial Sequence
  Description of Artificial Sequence:  Nucleic Acid
ccgcgggcggaggaaacucccuucaaggacaucguccgggcagcugcg

SEQ ID NO: 3006 - RNA, 48 nt, Artificial Sequence
  Description of Artificial Sequence:  Nucleic Acid
gccgcgggggaggaaacucccuucaaggacaucguccgggccagcugc

SEQ ID NO: 3007 - RNA, 48 nt, Artificial Sequence
  Description of Artificial Sequence:  Nucleic Acid
ccaugccgggaggaaacucccuucaaggacaucguccggggggcccag

SEQ ID NO: 3008 - RNA, 48 nt, Artificial Sequence
  Description of Artificial Sequence:  Nucleic Acid
guccaugcggaggaaacucccuucaaggacaucguccggggcgggccc

SEQ ID NO: 3009 - RNA, 48 nt, Artificial Sequence
  Description of Artificial Sequence:  Nucleic Acid
cguccaugggaggaaacucccuucaaggacaucguccgggcgcgggcc

SEQ ID NO: 3010 - RNA, 48 nt, Artificial Sequence
  Description of Artificial Sequence:  Nucleic Acid
aguucgucggaggaaacucccuucaaggacaucguccgggaugccgcg

SEQ ID NO: 3011 - RNA, 48 nt, Artificial Sequence
  Description of Artificial Sequence:  Nucleic Acid
caguucguggaggaaacucccuucaaggacaucguccgggcaugccgc

SEQ ID NO: 3012 - RNA, 48 nt, Artificial Sequence
  Description of Artificial Sequence:  Nucleic Acid
gaacaguuggaggaaacucccuucaaggacaucguccgggguccaugc

SEQ ID NO: 3013 - RNA, 48 nt, Artificial Sequence
  Description of Artificial Sequence:  Nucleic Acid
agggggaaggaggaaacucccuucaaggacaucguccgggaguucguc

SEQ ID NO: 3014 - RNA, 48 nt, Artificial Sequence
  Description of Artificial Sequence:  Nucleic Acid
ugcucugcggaggaaacucccuucaaggacaucguccggggggaagau

SEQ ID NO: 3015 - RNA, 48 nt, Artificial Sequence
  Description of Artificial Sequence:  Nucleic Acid
cugcucugggaggaaacucccuucaaggacaucguccgggcgggaaga

SEQ ID NO: 3016 - RNA, 48 nt, Artificial Sequence
  Description of Artificial Sequence:  Nucleic Acid
gggcugcuggaggaaacucccuucaaggacaucguccgggugccggga

SEQ ID NO: 3017 - RNA, 48 nt, Artificial Sequence
  Description of Artificial Sequence:  Nucleic Acid
uugggcugggaggaaacucccuucaaggacaucguccgggucugccgg

SEQ ID NO: 3018 - RNA, 48 nt, Artificial Sequence
  Description of Artificial Sequence:  Nucleic Acid
ugcuugggggaggaaacucccuucaaggacaucguccgggugcucugc

SEQ ID NO: 3019 - RNA, 48 nt, Artificial Sequence
  Description of Artificial Sequence:  Nucleic Acid
ccccgcugggaggaaacucccuucaaggacaucguccggguugggcug

SEQ ID NO: 3020 - RNA, 48 nt, Artificial Sequence
  Description of Artificial Sequence:  Nucleic Acid
augccccgggaggaaacucccuucaaggacaucguccgggugcuuggg

SEQ ID NO: 3021 - RNA, 48 nt, Artificial Sequence
  Description of Artificial Sequence:  Nucleic Acid
gcaugcccggaggaaacucccuucaaggacaucguccggggcugcuug

SEQ ID NO: 3022 - RNA, 48 nt, Artificial Sequence
  Description of Artificial Sequence:  Nucleic Acid
cgcaugccggaggaaacucccuucaaggacaucguccgggcgcugcuu

SEQ ID NO: 3023 - RNA, 48 nt, Artificial Sequence
  Description of Artificial Sequence:  Nucleic Acid
gcgcaugcggaggaaacucccuucaaggacaucguccgggccgcugcu

SEQ ID NO: 3024 - RNA, 48 nt, Artificial Sequence
  Description of Artificial Sequence:  Nucleic Acid
agcgcaugggaggaaacucccuucaaggacaucguccgggcccgcugc

SEQ ID NO: 3025 - RNA, 48 nt, Artificial Sequence
  Description of Artificial Sequence:  Nucleic Acid
cggaagcgggaggaaacucccuucaaggacaucguccgggaugccccg

SEQ ID NO: 3026 - RNA, 48 nt, Artificial Sequence
  Description of Artificial Sequence:  Nucleic Acid
agcggaagggaggaaacucccuucaaggacaucguccggggcaugccc

SEQ ID NO: 3027 - RNA, 48 nt, Artificial Sequence
  Description of Artificial Sequence:  Nucleic Acid
acuuguagggaggaaacucccuucaaggacaucguccgggggaagcgc

SEQ ID NO: 3028 - RNA, 48 nt, Artificial Sequence
  Description of Artificial Sequence:  Nucleic Acid
cccucgcaggaggaaacucccuucaaggacaucguccggguuguagcg

SEQ ID NO: 3029 - RNA, 48 nt, Artificial Sequence
  Description of Artificial Sequence:  Nucleic Acid
gccccucgggaggaaacucccuucaaggacaucguccgggacuuguag

SEQ ID NO: 3030 - RNA, 48 nt, Artificial Sequence
  Description of Artificial Sequence:  Nucleic Acid
gcgccccuggaggaaacucccuucaaggacaucguccggggcacuugu

SEQ ID NO: 3031 - RNA, 48 nt, Artificial Sequence
  Description of Artificial Sequence:  Nucleic Acid
gagcgcccggaggaaacucccuucaaggacaucguccgggucgcacuu

SEQ ID NO: 3032 - RNA, 48 nt, Artificial Sequence
  Description of Artificial Sequence:  Nucleic Acid
ggagcgccggaggaaacucccuucaaggacaucguccgggcucgcacu

SEQ ID NO: 3033 - RNA, 48 nt, Artificial Sequence
  Description of Artificial Sequence:  Nucleic Acid
cggagcgcggaggaaacucccuucaaggacaucguccgggccucgcac

SEQ ID NO: 3034 - RNA, 48 nt, Artificial Sequence
  Description of Artificial Sequence:  Nucleic Acid
gcggagcgggaggaaacucccuucaaggacaucguccgggcccucgca

SEQ ID NO: 3035 - RNA, 48 nt, Artificial Sequence
  Description of Artificial Sequence:  Nucleic Acid
ccgcggagggaggaaacucccuucaaggacaucguccggggccccucg

SEQ ID NO: 3036 - RNA, 48 nt, Artificial Sequence
  Description of Artificial Sequence:  Nucleic Acid
gcugcccgggaggaaacucccuucaaggacaucguccgggggagcgcc

SEQ ID NO: 3037 - RNA, 48 nt, Artificial Sequence
  Description of Artificial Sequence:  Nucleic Acid
augcugccggaggaaacucccuucaaggacaucguccggggcggagcg

SEQ ID NO: 3038 - RNA, 48 nt, Artificial Sequence
  Description of Artificial Sequence:  Nucleic Acid
gaugcugcggaggaaacucccuucaaggacaucguccgggcgcggagc

SEQ ID NO: 3039 - RNA, 48 nt, Artificial Sequence
  Description of Artificial Sequence:  Nucleic Acid
ggaugcugggaggaaacucccuucaaggacaucguccgggccgcggag

SEQ ID NO: 3040 - RNA, 48 nt, Artificial Sequence
  Description of Artificial Sequence:  Nucleic Acid
cugggaugggaggaaacucccuucaaggacaucguccgggugcccgcg

SEQ ID NO: 3041 - RNA, 48 nt, Artificial Sequence
  Description of Artificial Sequence:  Nucleic Acid
ccucucgcggaggaaacucccuucaaggacaucguccgggugggaugc

SEQ ID NO: 3042 - RNA, 48 nt, Artificial Sequence
  Description of Artificial Sequence:  Nucleic Acid
uccucucgggaggaaacucccuucaaggacaucguccgggcugggaug

SEQ ID NO: 3043 - RNA, 48 nt, Artificial Sequence
  Description of Artificial Sequence:  Nucleic Acid
gcuccucuggaggaaacucccuucaaggacaucguccggggccuggga

SEQ ID NO: 3044 - RNA, 48 nt, Artificial Sequence
  Description of Artificial Sequence:  Nucleic Acid
gugcuccuggaggaaacucccuucaaggacaucguccgggucgccugg

SEQ ID NO: 3045 - RNA, 48 nt, Artificial Sequence
  Description of Artificial Sequence:  Nucleic Acid
cugugcucggaggaaacucccuucaaggacaucguccgggucucgccu

SEQ ID NO: 3046 - RNA, 48 nt, Artificial Sequence
  Description of Artificial Sequence:  Nucleic Acid
ucugugcuggaggaaacucccuucaaggacaucguccgggcucucgcc

SEQ ID NO: 3047 - RNA, 48 nt, Artificial Sequence
  Description of Artificial Sequence:  Nucleic Acid
uaucugugggaggaaacucccuucaaggacaucguccggguccucucg

SEQ ID NO: 3048 - RNA, 48 nt, Artificial Sequence
  Description of Artificial Sequence:  Nucleic Acid
ggugguauggaggaaacucccuucaaggacaucguccgggugugcucc

SEQ ID NO: 3049 - RNA, 48 nt, Artificial Sequence
  Description of Artificial Sequence:  Nucleic Acid
ggguggguggaggaaacucccuucaaggacaucguccggguugguggu

SEQ ID NO: 3050 - RNA, 48 nt, Artificial Sequence
  Description of Artificial Sequence:  Nucleic Acid
ccauugauggaggaaacucccuucaaggacaucguccggguugauggu

SEQ ID NO: 3051 - RNA, 48 nt, Artificial Sequence
  Description of Artificial Sequence:  Nucleic Acid
uguguagcggaggaaacucccuucaaggacaucguccgggauugaucu

SEQ ID NO: 3052 - RNA, 48 nt, Artificial Sequence
  Description of Artificial Sequence:  Nucleic Acid
cuguguagggaggaaacucccuucaaggacaucguccgggcauugauc

SEQ ID NO: 3053 - RNA, 48 nt, Artificial Sequence
  Description of Artificial Sequence:  Nucleic Acid
cccuggucggaggaaacucccuucaaggacaucguccggguguguagc

SEQ ID NO: 3054 - RNA, 48 nt, Artificial Sequence
  Description of Artificial Sequence:  Nucleic Acid
ucccugguggaggaaacucccuucaaggacaucguccgggcuguguag

SEQ ID NO: 3055 - RNA, 48 nt, Artificial Sequence
  Description of Artificial Sequence:  Nucleic Acid
cacuguccggaggaaacucccuucaaggacaucguccgggugguccug

SEQ ID NO: 3056 - RNA, 48 nt, Artificial Sequence
  Description of Artificial Sequence:  Nucleic Acid
gcacugucggaggaaacucccuucaaggacaucguccgggcugguccu

SEQ ID NO: 3057 - RNA, 48 nt, Artificial Sequence
  Description of Artificial Sequence:  Nucleic Acid
cgcacuguggaggaaacucccuucaaggacaucguccgggccuggucc

SEQ ID NO: 3058 - RNA, 48 nt, Artificial Sequence
  Description of Artificial Sequence:  Nucleic Acid
gaugcgcaggaggaaacucccuucaaggacaucguccgggugucccug

SEQ ID NO: 3059 - RNA, 48 nt, Artificial Sequence
  Description of Artificial Sequence:  Nucleic Acid
gagaugcgggaggaaacucccuucaaggacaucguccgggacuguccc

SEQ ID NO: 3060 - RNA, 48 nt, Artificial Sequence
  Description of Artificial Sequence:  Nucleic Acid
gggagaugggaggaaacucccuucaaggacaucguccggggcacuguc

SEQ ID NO: 3061 - RNA, 48 nt, Artificial Sequence
  Description of Artificial Sequence:  Nucleic Acid
uuggugacggaggaaacucccuucaaggacaucguccgggagggagau

SEQ ID NO: 3062 - RNA, 48 nt, Artificial Sequence
  Description of Artificial Sequence:  Nucleic Acid
cuuggugaggaggaaacucccuucaaggacaucguccgggcagggaga

SEQ ID NO: 3063 - RNA, 48 nt, Artificial Sequence
  Description of Artificial Sequence:  Nucleic Acid
ggagggucggaggaaacucccuucaaggacaucguccggguuggugac

SEQ ID NO: 3064 - RNA, 48 nt, Artificial Sequence
  Description of Artificial Sequence:  Nucleic Acid
aggaggguggaggaaacucccuucaaggacaucguccgggcuugguga

SEQ ID NO: 3065 - RNA, 48 nt, Artificial Sequence
  Description of Artificial Sequence:  Nucleic Acid
ggugaggcggaggaaacucccuucaaggacaucguccgggggugagga

SEQ ID NO: 3066 - RNA, 48 nt, Artificial Sequence
  Description of Artificial Sequence:  Nucleic Acid
gggugaggggaggaaacucccuucaaggacaucguccgggcggugagg

SEQ ID NO: 3067 - RNA, 48 nt, Artificial Sequence
  Description of Artificial Sequence:  Nucleic Acid
uacaagcuggaggaaacucccuucaaggacaucguccggggugggggu

SEQ ID NO: 3068 - RNA, 48 nt, Artificial Sequence
  Description of Artificial Sequence:  Nucleic Acid
ccuacaagggaggaaacucccuucaaggacaucguccgggucgugggg

SEQ ID NO: 3069 - RNA, 48 nt, Artificial Sequence
  Description of Artificial Sequence:  Nucleic Acid
cuuuccuaggaggaaacucccuucaaggacaucguccgggaagcucgu

SEQ ID NO: 3070 - RNA, 48 nt, Artificial Sequence
  Description of Artificial Sequence:  Nucleic Acid
guccuuucggaggaaacucccuucaaggacaucguccggguacaagcu

SEQ ID NO: 3071 - RNA, 48 nt, Artificial Sequence
  Description of Artificial Sequence:  Nucleic Acid
aguccuuuggaggaaacucccuucaaggacaucguccgggcuacaagc

SEQ ID NO: 3072 - RNA, 48 nt, Artificial Sequence
  Description of Artificial Sequence:  Nucleic Acid
cggcagucggaggaaacucccuucaaggacaucguccggguuuccuac

SEQ ID NO: 3073 - RNA, 48 nt, Artificial Sequence
  Description of Artificial Sequence:  Nucleic Acid
ccggcaguggaggaaacucccuucaaggacaucguccgggcuuuccua

SEQ ID NO: 3074 - RNA, 48 nt, Artificial Sequence
  Description of Artificial Sequence:  Nucleic Acid
caucccggggaggaaacucccuucaaggacaucguccgggaguccuuu

SEQ ID NO: 3075 - RNA, 48 nt, Artificial Sequence
  Description of Artificial Sequence:  Nucleic Acid
agccauccggaggaaacucccuucaaggacaucguccgggggcagucc

SEQ ID NO: 3076 - RNA, 48 nt, Artificial Sequence
  Description of Artificial Sequence:  Nucleic Acid
aagccaucggaggaaacucccuucaaggacaucguccgggcggcaguc

SEQ ID NO: 3077 - RNA, 48 nt, Artificial Sequence
  Description of Artificial Sequence:  Nucleic Acid
gaagccauggaggaaacucccuucaaggacaucguccgggccggcagu

SEQ ID NO: 3078 - RNA, 48 nt, Artificial Sequence
  Description of Artificial Sequence:  Nucleic Acid
auagaagcggaggaaacucccuucaaggacaucguccgggaucccggc

SEQ ID NO: 3079 - RNA, 48 nt, Artificial Sequence
  Description of Artificial Sequence:  Nucleic Acid
cauagaagggaggaaacucccuucaaggacaucguccgggcaucccgg

SEQ ID NO: 3080 - RNA, 48 nt, Artificial Sequence
  Description of Artificial Sequence:  Nucleic Acid
cucagccuggaggaaacucccuucaaggacaucguccgggauagaagc

SEQ ID NO: 3081 - RNA, 48 nt, Artificial Sequence
  Description of Artificial Sequence:  Nucleic Acid
agcucagcggaggaaacucccuucaaggacaucguccgggucauagaa

SEQ ID NO: 3082 - RNA, 48 nt, Artificial Sequence
  Description of Artificial Sequence:  Nucleic Acid
gagcucagggaggaaacucccuucaaggacaucguccgggcucauaga

SEQ ID NO: 3083 - RNA, 48 nt, Artificial Sequence
  Description of Artificial Sequence:  Nucleic Acid
gcagagcuggaggaaacucccuucaaggacaucguccgggagccucau

SEQ ID NO: 3084 - RNA, 48 nt, Artificial Sequence
  Description of Artificial Sequence:  Nucleic Acid
gggcagagggaggaaacucccuucaaggacaucguccgggucagccuc

SEQ ID NO: 3085 - RNA, 48 nt, Artificial Sequence
  Description of Artificial Sequence:  Nucleic Acid
gguccgggggaggaaacucccuucaaggacaucguccgggagagcuca

SEQ ID NO: 3086 - RNA, 48 nt, Artificial Sequence
  Description of Artificial Sequence:  Nucleic Acid
cagcggucggaggaaacucccuucaaggacaucguccggggggcagag

SEQ ID NO: 3087 - RNA, 48 nt, Artificial Sequence
  Description of Artificial Sequence:  Nucleic Acid
gcagcgguggaggaaacucccuucaaggacaucguccgggcgggcaga

SEQ ID NO: 3088 - RNA, 48 nt, Artificial Sequence
  Description of Artificial Sequence:  Nucleic Acid
ggaugcagggaggaaacucccuucaaggacaucguccggggguccggg

SEQ ID NO: 3089 - RNA, 48 nt, Artificial Sequence
  Description of Artificial Sequence:  Nucleic Acid
uguggaugggaggaaacucccuucaaggacaucguccgggagcggucc

SEQ ID NO: 3090 - RNA, 48 nt, Artificial Sequence
  Description of Artificial Sequence:  Nucleic Acid
ucuggaaaggaggaaacucccuucaaggacaucguccggguguggaug

SEQ ID NO: 3091 - RNA, 48 nt, Artificial Sequence
  Description of Artificial Sequence:  Nucleic Acid
cccagguuggaggaaacucccuucaaggacaucguccggguggaaacu

SEQ ID NO: 3092 - RNA, 48 nt, Artificial Sequence
  Description of Artificial Sequence:  Nucleic Acid
uggauuccggaggaaacucccuucaaggacaucguccgggagguucug

SEQ ID NO: 3093 - RNA, 48 nt, Artificial Sequence
  Description of Artificial Sequence:  Nucleic Acid
cuggauucggaggaaacucccuucaaggacaucguccgggcagguucu

SEQ ID NO: 3094 - RNA, 48 nt, Artificial Sequence
  Description of Artificial Sequence:  Nucleic Acid
acuggauuggaggaaacucccuucaaggacaucguccgggccagguuc

SEQ ID NO: 3095 - RNA, 48 nt, Artificial Sequence
  Description of Artificial Sequence:  Nucleic Acid
uucacacaggaggaaacucccuucaaggacaucguccggguggauucc

SEQ ID NO: 3096 - RNA, 48 nt, Artificial Sequence
  Description of Artificial Sequence:  Nucleic Acid
ucuucacaggaggaaacucccuucaaggacaucguccgggacuggauu

SEQ ID NO: 3097 - RNA, 48 nt, Artificial Sequence
  Description of Artificial Sequence:  Nucleic Acid
cuucuucaggaggaaacucccuucaaggacaucguccgggacacugga

SEQ ID NO: 3098 - RNA, 48 nt, Artificial Sequence
  Description of Artificial Sequence:  Nucleic Acid
cgcuucuuggaggaaacucccuucaaggacaucguccgggacacacug

SEQ ID NO: 3099 - RNA, 48 nt, Artificial Sequence
  Description of Artificial Sequence:  Nucleic Acid
ucccgcuuggaggaaacucccuucaaggacaucguccggguucacaca

SEQ ID NO: 3100 - RNA, 48 nt, Artificial Sequence
  Description of Artificial Sequence:  Nucleic Acid
aggucccgggaggaaacucccuucaaggacaucguccggguucuucac

SEQ ID NO: 3101 - RNA, 48 nt, Artificial Sequence
  Description of Artificial Sequence:  Nucleic Acid
ccagguccggaggaaacucccuucaaggacaucguccggggcuucuuc

SEQ ID NO: 3102 - RNA, 48 nt, Artificial Sequence
  Description of Artificial Sequence:  Nucleic Acid
uccaggucggaggaaacucccuucaaggacaucguccgggcgcuucuu

SEQ ID NO: 3103 - RNA, 48 nt, Artificial Sequence
  Description of Artificial Sequence:  Nucleic Acid
cuccagguggaggaaacucccuucaaggacaucguccgggccgcuucu

SEQ ID NO: 3104 - RNA, 48 nt, Artificial Sequence
  Description of Artificial Sequence:  Nucleic Acid
gccugcucggaggaaacucccuucaaggacaucguccgggaggucccg

SEQ ID NO: 3105 - RNA, 48 nt, Artificial Sequence
  Description of Artificial Sequence:  Nucleic Acid
agccugcuggaggaaacucccuucaaggacaucguccgggcagguccc

SEQ ID NO: 3106 - RNA, 48 nt, Artificial Sequence
  Description of Artificial Sequence:  Nucleic Acid
auagccugggaggaaacucccuucaaggacaucguccggguccagguc

SEQ ID NO: 3107 - RNA, 48 nt, Artificial Sequence
  Description of Artificial Sequence:  Nucleic Acid
cugauagcggaggaaacucccuucaaggacaucguccgggugcuccag

SEQ ID NO: 3108 - RNA, 48 nt, Artificial Sequence
  Description of Artificial Sequence:  Nucleic Acid
acugauagggaggaaacucccuucaaggacaucguccgggcugcucca

SEQ ID NO: 3109 - RNA, 48 nt, Artificial Sequence
  Description of Artificial Sequence:  Nucleic Acid
ugcgcugaggaggaaacucccuucaaggacaucguccgggugauagcc

SEQ ID NO: 3110 - RNA, 48 nt, Artificial Sequence
  Description of Artificial Sequence:  Nucleic Acid
uggaugcgggaggaaacucccuucaaggacaucguccgggugacugau

SEQ ID NO: 3111 - RNA, 48 nt, Artificial Sequence
  Description of Artificial Sequence:  Nucleic Acid
ucuggaugggaggaaacucccuucaaggacaucguccggggcugacug

SEQ ID NO: 3112 - RNA, 48 nt, Artificial Sequence
  Description of Artificial Sequence:  Nucleic Acid
uuguugguggaggaaacucccuucaaggacaucguccggguggaugcg

SEQ ID NO: 3113 - RNA, 48 nt, Artificial Sequence
  Description of Artificial Sequence:  Nucleic Acid
uauaggaaggaggaaacucccuucaaggacaucguccggguuggaagg

SEQ ID NO: 3114 - RNA, 48 nt, Artificial Sequence
  Description of Artificial Sequence:  Nucleic Acid
cugcucuuggaggaaacucccuucaaggacaucguccggguauaggaa

SEQ ID NO: 3115 - RNA, 48 nt, Artificial Sequence
  Description of Artificial Sequence:  Nucleic Acid
acgcugcuggaggaaacucccuucaaggacaucguccggguucuauag

SEQ ID NO: 3116 - RNA, 48 nt, Artificial Sequence
  Description of Artificial Sequence:  Nucleic Acid
ccacgcugggaggaaacucccuucaaggacaucguccgggucuucuau

SEQ ID NO: 3117 - RNA, 48 nt, Artificial Sequence
  Description of Artificial Sequence:  Nucleic Acid
uccccacgggaggaaacucccuucaaggacaucguccgggugcucuuc

SEQ ID NO: 3118 - RNA, 48 nt, Artificial Sequence
  Description of Artificial Sequence:  Nucleic Acid
aguccccaggaggaaacucccuucaaggacaucguccggggcugcucu

SEQ ID NO: 3119 - RNA, 48 nt, Artificial Sequence
  Description of Artificial Sequence:  Nucleic Acid
guagucccggaggaaacucccuucaaggacaucguccgggacgcugcu

SEQ ID NO: 3120 - RNA, 48 nt, Artificial Sequence
  Description of Artificial Sequence:  Nucleic Acid
cguaguccggaggaaacucccuucaaggacaucguccgggcacgcugc

SEQ ID NO: 3121 - RNA, 48 nt, Artificial Sequence
  Description of Artificial Sequence:  Nucleic Acid
ucguagucggaggaaacucccuucaaggacaucguccgggccacgcug

SEQ ID NO: 3122 - RNA, 48 nt, Artificial Sequence
  Description of Artificial Sequence:  Nucleic Acid
gucguaguggaggaaacucccuucaaggacaucguccgggcccacgcu

SEQ ID NO: 3123 - RNA, 48 nt, Artificial Sequence
  Description of Artificial Sequence:  Nucleic Acid
auucagguggaggaaacucccuucaaggacaucguccgggguaguccc

SEQ ID NO: 3124 - RNA, 48 nt, Artificial Sequence
  Description of Artificial Sequence:  Nucleic Acid
acagcauuggaggaaacucccuucaaggacaucguccgggaggucgua

SEQ ID NO: 3125 - RNA, 48 nt, Artificial Sequence
  Description of Artificial Sequence:  Nucleic Acid
ccgcacagggaggaaacucccuucaaggacaucguccgggauucaggu

SEQ ID NO: 3126 - RNA, 48 nt, Artificial Sequence
  Description of Artificial Sequence:  Nucleic Acid
gagccgcaggaggaaacucccuucaaggacaucguccgggagcauuca

SEQ ID NO: 3127 - RNA, 48 nt, Artificial Sequence
  Description of Artificial Sequence:  Nucleic Acid
cagagccgggaggaaacucccuucaaggacaucguccgggacagcauu

SEQ ID NO: 3128 - RNA, 48 nt, Artificial Sequence
  Description of Artificial Sequence:  Nucleic Acid
agcagagcggaggaaacucccuucaaggacaucguccggggcacagca

SEQ ID NO: 3129 - RNA, 48 nt, Artificial Sequence
  Description of Artificial Sequence:  Nucleic Acid
aagcagagggaggaaacucccuucaaggacaucguccgggcgcacagc

SEQ ID NO: 3130 - RNA, 48 nt, Artificial Sequence
  Description of Artificial Sequence:  Nucleic Acid
ccuggaagggaggaaacucccuucaaggacaucguccgggagagccgc

SEQ ID NO: 3131 - RNA, 48 nt, Artificial Sequence
  Description of Artificial Sequence:  Nucleic Acid
acugucacggaggaaacucccuucaaggacaucguccggguggaagca

SEQ ID NO: 3132 - RNA, 48 nt, Artificial Sequence
  Description of Artificial Sequence:  Nucleic Acid
cacugucaggaggaaacucccuucaaggacaucguccgggcuggaagc

SEQ ID NO: 3133 - RNA, 48 nt, Artificial Sequence
  Description of Artificial Sequence:  Nucleic Acid
cgcacuguggaggaaacucccuucaaggacaucguccgggaccuggaa

SEQ ID NO: 3134 - RNA, 48 nt, Artificial Sequence
  Description of Artificial Sequence:  Nucleic Acid
gucccgcaggaggaaacucccuucaaggacaucguccgggugucaccu

SEQ ID NO: 3135 - RNA, 48 nt, Artificial Sequence
  Description of Artificial Sequence:  Nucleic Acid
gggucccgggaggaaacucccuucaaggacaucguccgggacugucac

SEQ ID NO: 3136 - RNA, 48 nt, Artificial Sequence
  Description of Artificial Sequence:  Nucleic Acid
auggguccggaggaaacucccuucaaggacaucguccggggcacuguc

SEQ ID NO: 3137 - RNA, 48 nt, Artificial Sequence
  Description of Artificial Sequence:  Nucleic Acid
gaugggucggaggaaacucccuucaaggacaucguccgggcgcacugu

SEQ ID NO: 3138 - RNA, 48 nt, Artificial Sequence
  Description of Artificial Sequence:  Nucleic Acid
ugauggguggaggaaacucccuucaaggacaucguccgggccgcacug

SEQ ID NO: 3139 - RNA, 48 nt, Artificial Sequence
  Description of Artificial Sequence:  Nucleic Acid
gggccugcggaggaaacucccuucaaggacaucguccgggugaugggu

SEQ ID NO: 3140 - RNA, 48 nt, Artificial Sequence
  Description of Artificial Sequence:  Nucleic Acid
ggggccugggaggaaacucccuucaaggacaucguccgggcugauggg

SEQ ID NO: 3141 - RNA, 48 nt, Artificial Sequence
  Description of Artificial Sequence:  Nucleic Acid
ggaggggcggaggaaacucccuucaaggacaucguccgggugccugau

SEQ ID NO: 3142 - RNA, 48 nt, Artificial Sequence
  Description of Artificial Sequence:  Nucleic Acid
cggaggggggaggaaacucccuucaaggacaucguccgggcugccuga

SEQ ID NO: 3143 - RNA, 48 nt, Artificial Sequence
  Description of Artificial Sequence:  Nucleic Acid
gcggcaggggaggaaacucccuucaaggacaucguccgggggaggggc

SEQ ID NO: 3144 - RNA, 48 nt, Artificial Sequence
  Description of Artificial Sequence:  Nucleic Acid
acaggcggggaggaaacucccuucaaggacaucguccgggaggcggag

SEQ ID NO: 3145 - RNA, 48 nt, Artificial Sequence
  Description of Artificial Sequence:  Nucleic Acid
aggacaggggaggaaacucccuucaaggacaucguccgggggcaggcg

SEQ ID NO: 3146 - RNA, 48 nt, Artificial Sequence
  Description of Artificial Sequence:  Nucleic Acid
agaaaggaggaggaaacucccuucaaggacaucguccgggaggcggca

SEQ ID NO: 3147 - RNA, 48 nt, Artificial Sequence
  Description of Artificial Sequence:  Nucleic Acid
acgauuguggaggaaacucccuucaaggacaucguccgggaaagaugg

SEQ ID NO: 3148 - RNA, 48 nt, Artificial Sequence
  Description of Artificial Sequence:  Nucleic Acid
ugggggcaggaggaaacucccuucaaggacaucguccggggauuguca

SEQ ID NO: 3149 - RNA, 48 nt, Artificial Sequence
  Description of Artificial Sequence:  Nucleic Acid
guugggggggaggaaacucccuucaaggacaucguccgggacgauugu

SEQ ID NO: 3150 - RNA, 48 nt, Artificial Sequence
  Description of Artificial Sequence:  Nucleic Acid
gagcucggggaggaaacucccuucaaggacaucguccgggaguguugg

SEQ ID NO: 3151 - RNA, 48 nt, Artificial Sequence
  Description of Artificial Sequence:  Nucleic Acid
cuugagcuggaggaaacucccuucaaggacaucguccgggggcagugu

SEQ ID NO: 3152 - RNA, 48 nt, Artificial Sequence
  Description of Artificial Sequence:  Nucleic Acid
aucuugagggaggaaacucccuucaaggacaucguccgggucggcagu

SEQ ID NO: 3153 - RNA, 48 nt, Artificial Sequence
  Description of Artificial Sequence:  Nucleic Acid
cggcagauggaggaaacucccuucaaggacaucguccggguugagcuc

SEQ ID NO: 3154 - RNA, 48 nt, Artificial Sequence
  Description of Artificial Sequence:  Nucleic Acid
ucacucggggaggaaacucccuucaaggacaucguccgggagaucuug

SEQ ID NO: 3155 - RNA, 48 nt, Artificial Sequence
  Description of Artificial Sequence:  Nucleic Acid
gguucacuggaggaaacucccuucaaggacaucguccgggggcagauc

SEQ ID NO: 3156 - RNA, 48 nt, Artificial Sequence
  Description of Artificial Sequence:  Nucleic Acid
ucgguucaggaggaaacucccuucaaggacaucguccgggucggcaga

SEQ ID NO: 3157 - RNA, 48 nt, Artificial Sequence
  Description of Artificial Sequence:  Nucleic Acid
uuucgguuggaggaaacucccuucaaggacaucguccgggacucggca

SEQ ID NO: 3158 - RNA, 48 nt, Artificial Sequence
  Description of Artificial Sequence:  Nucleic Acid
cagaguuuggaggaaacucccuucaaggacaucguccggggguucacu

SEQ ID NO: 3159 - RNA, 48 nt, Artificial Sequence
  Description of Artificial Sequence:  Nucleic Acid
gcagcugcggaggaaacucccuucaaggacaucguccgggagaguuuc

SEQ ID NO: 3160 - RNA, 48 nt, Artificial Sequence
  Description of Artificial Sequence:  Nucleic Acid
ggcagcugggaggaaacucccuucaaggacaucguccgggcagaguuu

SEQ ID NO: 3161 - RNA, 48 nt, Artificial Sequence
  Description of Artificial Sequence:  Nucleic Acid
cgaggcagggaggaaacucccuucaaggacaucguccgggugccagag

SEQ ID NO: 3162 - RNA, 48 nt, Artificial Sequence
  Description of Artificial Sequence:  Nucleic Acid
caccgaggggaggaaacucccuucaaggacaucguccgggagcugcca

SEQ ID NO: 3163 - RNA, 48 nt, Artificial Sequence
  Description of Artificial Sequence:  Nucleic Acid
auccccacggaggaaacucccuucaaggacaucguccggggaggcagc

SEQ ID NO: 3164 - RNA, 48 nt, Artificial Sequence
  Description of Artificial Sequence:  Nucleic Acid
cauccccaggaggaaacucccuucaaggacaucguccgggcgaggcag

SEQ ID NO: 3165 - RNA, 48 nt, Artificial Sequence
  Description of Artificial Sequence:  Nucleic Acid
cucaucccggaggaaacucccuucaaggacaucguccgggaccgaggc

SEQ ID NO: 3166 - RNA, 48 nt, Artificial Sequence
  Description of Artificial Sequence:  Nucleic Acid
ucucauccggaggaaacucccuucaaggacaucguccgggcaccgagg

SEQ ID NO: 3167 - RNA, 48 nt, Artificial Sequence
  Description of Artificial Sequence:  Nucleic Acid
aucucaucggaggaaacucccuucaaggacaucguccgggccaccgag

SEQ ID NO: 3168 - RNA, 48 nt, Artificial Sequence
  Description of Artificial Sequence:  Nucleic Acid
gaucucauggaggaaacucccuucaaggacaucguccgggcccaccga

SEQ ID NO: 3169 - RNA, 48 nt, Artificial Sequence
  Description of Artificial Sequence:  Nucleic Acid
gaagaucuggaggaaacucccuucaaggacaucguccgggauccccac

SEQ ID NO: 3170 - RNA, 48 nt, Artificial Sequence
  Description of Artificial Sequence:  Nucleic Acid
aggaagauggaggaaacucccuucaaggacaucguccgggucaucccc

SEQ ID NO: 3171 - RNA, 48 nt, Artificial Sequence
  Description of Artificial Sequence:  Nucleic Acid
uugucacaggaggaaacucccuucaaggacaucguccgggaguaggaa

SEQ ID NO: 3172 - RNA, 48 nt, Artificial Sequence
  Description of Artificial Sequence:  Nucleic Acid
ccuugucaggaggaaacucccuucaaggacaucguccgggacaguagg

SEQ ID NO: 3173 - RNA, 48 nt, Artificial Sequence
  Description of Artificial Sequence:  Nucleic Acid
caccuuguggaggaaacucccuucaaggacaucguccgggacacagua

SEQ ID NO: 3174 - RNA, 48 nt, Artificial Sequence
  Description of Artificial Sequence:  Nucleic Acid
uucugcacggaggaaacucccuucaaggacaucguccggguugucaca

SEQ ID NO: 3175 - RNA, 48 nt, Artificial Sequence
  Description of Artificial Sequence:  Nucleic Acid
uuucugcaggaggaaacucccuucaaggacaucguccgggcuugucac

SEQ ID NO: 3176 - RNA, 48 nt, Artificial Sequence
  Description of Artificial Sequence:  Nucleic Acid
ucuuucugggaggaaacucccuucaaggacaucguccgggaccuuguc

SEQ ID NO: 3177 - RNA, 48 nt, Artificial Sequence
  Description of Artificial Sequence:  Nucleic Acid
uccucuuuggaggaaacucccuucaaggacaucguccgggugcaccuu

SEQ ID NO: 3178 - RNA, 48 nt, Artificial Sequence
  Description of Artificial Sequence:  Nucleic Acid
aauguccuggaggaaacucccuucaaggacaucguccggguuucugca

SEQ ID NO: 3179 - RNA, 48 nt, Artificial Sequence
  Description of Artificial Sequence:  Nucleic Acid
ucaaugucggaggaaacucccuucaaggacaucguccgggucuuucug

SEQ ID NO: 3180 - RNA, 48 nt, Artificial Sequence
  Description of Artificial Sequence:  Nucleic Acid
cucaauguggaggaaacucccuucaaggacaucguccgggcucuuucu

SEQ ID NO: 3181 - RNA, 48 nt, Artificial Sequence
  Description of Artificial Sequence:  Nucleic Acid
auacaccuggaggaaacucccuucaaggacaucguccgggaauguccu

SEQ ID NO: 3182 - RNA, 48 nt, Artificial Sequence
  Description of Artificial Sequence:  Nucleic Acid
aaauacacggaggaaacucccuucaaggacaucguccgggucaauguc

SEQ ID NO: 3183 - RNA, 48 nt, Artificial Sequence
  Description of Artificial Sequence:  Nucleic Acid
gaaauacaggaggaaacucccuucaaggacaucguccgggcucaaugu

SEQ ID NO: 3184 - RNA, 48 nt, Artificial Sequence
  Description of Artificial Sequence:  Nucleic Acid
gugaaauaggaggaaacucccuucaaggacaucguccgggaccucaau

SEQ ID NO: 3185 - RNA, 48 nt, Artificial Sequence
  Description of Artificial Sequence:  Nucleic Acid
ccugguccggaggaaacucccuucaaggacaucguccggggugaaaua

SEQ ID NO: 3186 - RNA, 48 nt, Artificial Sequence
  Description of Artificial Sequence:  Nucleic Acid
gccuggucggaggaaacucccuucaaggacaucguccgggcgugaaau

SEQ ID NO: 3187 - RNA, 48 nt, Artificial Sequence
  Description of Artificial Sequence:  Nucleic Acid
agccugguggaggaaacucccuucaaggacaucguccgggccgugaaa

SEQ ID NO: 3188 - RNA, 48 nt, Artificial Sequence
  Description of Artificial Sequence:  Nucleic Acid
cucccagcggaggaaacucccuucaaggacaucguccggguggucccg

SEQ ID NO: 3189 - RNA, 48 nt, Artificial Sequence
  Description of Artificial Sequence:  Nucleic Acid
ccucccagggaggaaacucccuucaaggacaucguccgggcugguccc

SEQ ID NO: 3190 - RNA, 48 nt, Artificial Sequence
  Description of Artificial Sequence:  Nucleic Acid
gggccuccggaggaaacucccuucaaggacaucguccgggagccuggu

SEQ ID NO: 3191 - RNA, 48 nt, Artificial Sequence
  Description of Artificial Sequence:  Nucleic Acid
cgggccucggaggaaacucccuucaaggacaucguccgggcagccugg

SEQ ID NO: 3192 - RNA, 48 nt, Artificial Sequence
  Description of Artificial Sequence:  Nucleic Acid
ucgggccuggaggaaacucccuucaaggacaucguccgggccagccug

SEQ ID NO: 3193 - RNA, 48 nt, Artificial Sequence
  Description of Artificial Sequence:  Nucleic Acid
ccucgggcggaggaaacucccuucaaggacaucguccgggucccagcc

SEQ ID NO: 3194 - RNA, 48 nt, Artificial Sequence
  Description of Artificial Sequence:  Nucleic Acid
gccucgggggaggaaacucccuucaaggacaucguccgggcucccagc

SEQ ID NO: 3195 - RNA, 48 nt, Artificial Sequence
  Description of Artificial Sequence:  Nucleic Acid
aggagccuggaggaaacucccuucaaggacaucguccggggggccucc

SEQ ID NO: 3196 - RNA, 48 nt, Artificial Sequence
  Description of Artificial Sequence:  Nucleic Acid
aaaggagcggaggaaacucccuucaaggacaucguccgggucgggccu

SEQ ID NO: 3197 - RNA, 48 nt, Artificial Sequence
  Description of Artificial Sequence:  Nucleic Acid
aaaaggagggaggaaacucccuucaaggacaucguccgggcucgggcc

SEQ ID NO: 3198 - RNA, 48 nt, Artificial Sequence
  Description of Artificial Sequence:  Nucleic Acid
ucagcuugggaggaaacucccuucaaggacaucguccggggaaaagga

SEQ ID NO: 3199 - RNA, 48 nt, Artificial Sequence
  Description of Artificial Sequence:  Nucleic Acid
cacaucagggaggaaacucccuucaaggacaucguccggguugcgaaa

SEQ ID NO: 3200 - RNA, 48 nt, Artificial Sequence
  Description of Artificial Sequence:  Nucleic Acid
gugcacauggaggaaacucccuucaaggacaucguccgggagcuugcg

SEQ ID NO: 3201 - RNA, 48 nt, Artificial Sequence
  Description of Artificial Sequence:  Nucleic Acid
ucggugcaggaggaaacucccuucaaggacaucguccgggaucagcuu

SEQ ID NO: 3202 - RNA, 48 nt, Artificial Sequence
  Description of Artificial Sequence:  Nucleic Acid
ugucggugggaggaaacucccuucaaggacaucguccgggacaucagc

SEQ ID NO: 3203 - RNA, 48 nt, Artificial Sequence
  Description of Artificial Sequence:  Nucleic Acid
ccacuuguggaggaaacucccuucaaggacaucguccgggggugcaca

SEQ ID NO: 3204 - RNA, 48 nt, Artificial Sequence
  Description of Artificial Sequence:  Nucleic Acid
aauggccaggaggaaacucccuucaaggacaucguccggguugucggu

SEQ ID NO: 3205 - RNA, 48 nt, Artificial Sequence
  Description of Artificial Sequence:  Nucleic Acid
acaauggcggaggaaacucccuucaaggacaucguccgggacuugucg

SEQ ID NO: 3206 - RNA, 48 nt, Artificial Sequence
  Description of Artificial Sequence:  Nucleic Acid
cacaauggggaggaaacucccuucaaggacaucguccgggcacuuguc

SEQ ID NO: 3207 - RNA, 48 nt, Artificial Sequence
  Description of Artificial Sequence:  Nucleic Acid
ccggaacaggaggaaacucccuucaaggacaucguccgggaauggcca

SEQ ID NO: 3208 - RNA, 48 nt, Artificial Sequence
  Description of Artificial Sequence:  Nucleic Acid
guccggaaggaggaaacucccuucaaggacaucguccgggacaauggc

SEQ ID NO: 3209 - RNA, 48 nt, Artificial Sequence
  Description of Artificial Sequence:  Nucleic Acid
gaggggucggaggaaacucccuucaaggacaucguccgggggaacaca

SEQ ID NO: 3210 - RNA, 48 nt, Artificial Sequence
  Description of Artificial Sequence:  Nucleic Acid
ggagggguggaggaaacucccuucaaggacaucguccgggcggaacac

SEQ ID NO: 3211 - RNA, 48 nt, Artificial Sequence
  Description of Artificial Sequence:  Nucleic Acid
ggggucugggaggaaacucccuucaaggacaucguccgggguagggag

SEQ ID NO: 3212 - RNA, 48 nt, Artificial Sequence
  Description of Artificial Sequence:  Nucleic Acid
gcugggguggaggaaacucccuucaaggacaucguccgggugcguagg

SEQ ID NO: 3213 - RNA, 48 nt, Artificial Sequence
  Description of Artificial Sequence:  Nucleic Acid
ccugcaggggaggaaacucccuucaaggacaucguccggguggggucu

SEQ ID NO: 3214 - RNA, 48 nt, Artificial Sequence
  Description of Artificial Sequence:  Nucleic Acid
ggagccugggaggaaacucccuucaaggacaucguccgggaggcuggg

SEQ ID NO: 3215 - RNA, 48 nt, Artificial Sequence
  Description of Artificial Sequence:  Nucleic Acid
acaggagcggaggaaacucccuucaaggacaucguccgggugcaggcu

SEQ ID NO: 3216 - RNA, 48 nt, Artificial Sequence
  Description of Artificial Sequence:  Nucleic Acid
cacaggagggaggaaacucccuucaaggacaucguccgggcugcaggc

SEQ ID NO: 3217 - RNA, 48 nt, Artificial Sequence
  Description of Artificial Sequence:  Nucleic Acid
gacacgcaggaggaaacucccuucaaggacaucguccgggaggagccu

SEQ ID NO: 3218 - RNA, 48 nt, Artificial Sequence
  Description of Artificial Sequence:  Nucleic Acid
gagacacgggaggaaacucccuucaaggacaucguccgggacaggagc

SEQ ID NO: 3219 - RNA, 48 nt, Artificial Sequence
  Description of Artificial Sequence:  Nucleic Acid
uggagacaggaggaaacucccuucaaggacaucguccggggcacagga

SEQ ID NO: 3220 - RNA, 48 nt, Artificial Sequence
  Description of Artificial Sequence:  Nucleic Acid
cauggagaggaggaaacucccuucaaggacaucguccgggacgcacag

SEQ ID NO: 3221 - RNA, 48 nt, Artificial Sequence
  Description of Artificial Sequence:  Nucleic Acid
cgcagcugggaggaaacucccuucaaggacaucguccgggauggagac

SEQ ID NO: 3222 - RNA, 48 nt, Artificial Sequence
  Description of Artificial Sequence:  Nucleic Acid
cgccgcagggaggaaacucccuucaaggacaucguccgggugcaugga

SEQ ID NO: 3223 - RNA, 48 nt, Artificial Sequence
  Description of Artificial Sequence:  Nucleic Acid
ggccgccgggaggaaacucccuucaaggacaucguccgggagcugcau

SEQ ID NO: 3224 - RNA, 48 nt, Artificial Sequence
  Description of Artificial Sequence:  Nucleic Acid
aaggccgcggaggaaacucccuucaaggacaucguccggggcagcugc

SEQ ID NO: 3225 - RNA, 48 nt, Artificial Sequence
  Description of Artificial Sequence:  Nucleic Acid
gaaggccgggaggaaacucccuucaaggacaucguccgggcgcagcug

SEQ ID NO: 3226 - RNA, 48 nt, Artificial Sequence
  Description of Artificial Sequence:  Nucleic Acid
cggaaggcggaggaaacucccuucaaggacaucguccggggccgcagc

SEQ ID NO: 3227 - RNA, 48 nt, Artificial Sequence
  Description of Artificial Sequence:  Nucleic Acid
ucggaaggggaggaaacucccuucaaggacaucguccgggcgccgcag

SEQ ID NO: 3228 - RNA, 48 nt, Artificial Sequence
  Description of Artificial Sequence:  Nucleic Acid
cucccgguggaggaaacucccuucaaggacaucguccgggggaaggcc

SEQ ID NO: 3229 - RNA, 48 nt, Artificial Sequence
  Description of Artificial Sequence:  Nucleic Acid
ugagcuccggaggaaacucccuucaaggacaucguccgggggucggaa

SEQ ID NO: 3230 - RNA, 48 nt, Artificial Sequence
  Description of Artificial Sequence:  Nucleic Acid
cugagcucggaggaaacucccuucaaggacaucguccgggcggucgga

SEQ ID NO: 3231 - RNA, 48 nt, Artificial Sequence
  Description of Artificial Sequence:  Nucleic Acid
acugagcuggaggaaacucccuucaaggacaucguccgggccggucgg

SEQ ID NO: 3232 - RNA, 48 nt, Artificial Sequence
  Description of Artificial Sequence:  Nucleic Acid
ucacugagggaggaaacucccuucaaggacaucguccgggucccgguc

SEQ ID NO: 3233 - RNA, 48 nt, Artificial Sequence
  Description of Artificial Sequence:  Nucleic Acid
ugggcucaggaggaaacucccuucaaggacaucguccgggugagcucc

SEQ ID NO: 3234 - RNA, 48 nt, Artificial Sequence
  Description of Artificial Sequence:  Nucleic Acid
caugggcuggaggaaacucccuucaaggacaucguccgggacugagcu

SEQ ID NO: 3235 - RNA, 48 nt, Artificial Sequence
  Description of Artificial Sequence:  Nucleic Acid
uccaugggggaggaaacucccuucaaggacaucguccgggucacugag

SEQ ID NO: 3236 - RNA, 48 nt, Artificial Sequence
  Description of Artificial Sequence:  Nucleic Acid
uggaauucggaggaaacucccuucaaggacaucguccgggaugggcuc

SEQ ID NO: 3237 - RNA, 48 nt, Artificial Sequence
  Description of Artificial Sequence:  Nucleic Acid
cuggaauuggaggaaacucccuucaaggacaucguccgggcaugggcu

SEQ ID NO: 3238 - RNA, 48 nt, Artificial Sequence
  Description of Artificial Sequence:  Nucleic Acid
ggcagguaggaggaaacucccuucaaggacaucguccggguggaauuc

SEQ ID NO: 3239 - RNA, 48 nt, Artificial Sequence
  Description of Artificial Sequence:  Nucleic Acid
guaucuggggaggaaacucccuucaaggacaucguccgggagguacug

SEQ ID NO: 3240 - RNA, 48 nt, Artificial Sequence
  Description of Artificial Sequence:  Nucleic Acid
gucuguauggaggaaacucccuucaaggacaucguccggguggcaggu

SEQ ID NO: 3241 - RNA, 48 nt, Artificial Sequence
  Description of Artificial Sequence:  Nucleic Acid
acgaucguggaggaaacucccuucaaggacaucguccggguguaucug

SEQ ID NO: 3242 - RNA, 48 nt, Artificial Sequence
  Description of Artificial Sequence:  Nucleic Acid
gugacgauggaggaaacucccuucaaggacaucguccggggucuguau

SEQ ID NO: 3243 - RNA, 48 nt, Artificial Sequence
  Description of Artificial Sequence:  Nucleic Acid
uccggugaggaggaaacucccuucaaggacaucguccggggaucgucu

SEQ ID NO: 3244 - RNA, 48 nt, Artificial Sequence
  Description of Artificial Sequence:  Nucleic Acid
ccucaaucggaggaaacucccuucaaggacaucguccgggggugacga

SEQ ID NO: 3245 - RNA, 48 nt, Artificial Sequence
  Description of Artificial Sequence:  Nucleic Acid
uccucaauggaggaaacucccuucaaggacaucguccgggcggugacg

SEQ ID NO: 3246 - RNA, 48 nt, Artificial Sequence
  Description of Artificial Sequence:  Nucleic Acid
uuucuccuggaggaaacucccuucaaggacaucguccgggaauccggu

SEQ ID NO: 3247 - RNA, 48 nt, Artificial Sequence
  Description of Artificial Sequence:  Nucleic Acid
cguuucucggaggaaacucccuucaaggacaucguccgggucaauccg

SEQ ID NO: 3248 - RNA, 48 nt, Artificial Sequence
  Description of Artificial Sequence:  Nucleic Acid
acguuucuggaggaaacucccuucaaggacaucguccgggcucaaucc

SEQ ID NO: 3249 - RNA, 48 nt, Artificial Sequence
  Description of Artificial Sequence:  Nucleic Acid
uuacguuuggaggaaacucccuucaaggacaucguccggguccucaau

SEQ ID NO: 3250 - RNA, 48 nt, Artificial Sequence
  Description of Artificial Sequence:  Nucleic Acid
uccuuuuaggaggaaacucccuucaaggacaucguccgggguuucucc

SEQ ID NO: 3251 - RNA, 48 nt, Artificial Sequence
  Description of Artificial Sequence:  Nucleic Acid
cauaugucggaggaaacucccuucaaggacaucguccggguuuuacgu

SEQ ID NO: 3252 - RNA, 48 nt, Artificial Sequence
  Description of Artificial Sequence:  Nucleic Acid
ucauauguggaggaaacucccuucaaggacaucguccgggcuuuuacg

SEQ ID NO: 3253 - RNA, 48 nt, Artificial Sequence
  Description of Artificial Sequence:  Nucleic Acid
gaaggucuggaggaaacucccuucaaggacaucguccgggauaugucc

SEQ ID NO: 3254 - RNA, 48 nt, Artificial Sequence
  Description of Artificial Sequence:  Nucleic Acid
uugaagguggaggaaacucccuucaaggacaucguccgggucauaugu

SEQ ID NO: 3255 - RNA, 48 nt, Artificial Sequence
  Description of Artificial Sequence:  Nucleic Acid
augaugcuggaggaaacucccuucaaggacaucguccggguugaaggu

SEQ ID NO: 3256 - RNA, 48 nt, Artificial Sequence
  Description of Artificial Sequence:  Nucleic Acid
ucaugaugggaggaaacucccuucaaggacaucguccgggucuugaag

SEQ ID NO: 3257 - RNA, 48 nt, Artificial Sequence
  Description of Artificial Sequence:  Nucleic Acid
cucuucuuggaggaaacucccuucaaggacaucguccgggaugaugcu

SEQ ID NO: 3258 - RNA, 48 nt, Artificial Sequence
  Description of Artificial Sequence:  Nucleic Acid
ggacucuuggaggaaacucccuucaaggacaucguccggguucaugau

SEQ ID NO: 3259 - RNA, 48 nt, Artificial Sequence
  Description of Artificial Sequence:  Nucleic Acid
aaaggacuggaggaaacucccuucaaggacaucguccggguucuucau

SEQ ID NO: 3260 - RNA, 48 nt, Artificial Sequence
  Description of Artificial Sequence:  Nucleic Acid
ugaaaggaggaggaaacucccuucaaggacaucguccgggucuucuuc

SEQ ID NO: 3261 - RNA, 48 nt, Artificial Sequence
  Description of Artificial Sequence:  Nucleic Acid
uggguccgggaggaaacucccuucaaggacaucguccgggugaaagga

SEQ ID NO: 3262 - RNA, 48 nt, Artificial Sequence
  Description of Artificial Sequence:  Nucleic Acid
ggugggucggaggaaacucccuucaaggacaucguccggggcugaaag

SEQ ID NO: 3263 - RNA, 48 nt, Artificial Sequence
  Description of Artificial Sequence:  Nucleic Acid
cgguggguggaggaaacucccuucaaggacaucguccgggcgcugaaa

SEQ ID NO: 3264 - RNA, 48 nt, Artificial Sequence
  Description of Artificial Sequence:  Nucleic Acid
ccggggguggaggaaacucccuucaaggacaucguccggggguggguc

SEQ ID NO: 3265 - RNA, 48 nt, Artificial Sequence
  Description of Artificial Sequence:  Nucleic Acid
guggaggcggaggaaacucccuucaaggacaucguccggggggggucg

SEQ ID NO: 3266 - RNA, 48 nt, Artificial Sequence
  Description of Artificial Sequence:  Nucleic Acid
gguggaggggaggaaacucccuucaaggacaucguccgggcggggguc

SEQ ID NO: 3267 - RNA, 48 nt, Artificial Sequence
  Description of Artificial Sequence:  Nucleic Acid
caaugcguggaggaaacucccuucaaggacaucguccggggaggugga

SEQ ID NO: 3268 - RNA, 48 nt, Artificial Sequence
  Description of Artificial Sequence:  Nucleic Acid
cagcaaugggaggaaacucccuucaaggacaucguccggggucgaggu

SEQ ID NO: 3269 - RNA, 48 nt, Artificial Sequence
  Description of Artificial Sequence:  Nucleic Acid
aggcacagggaggaaacucccuucaaggacaucguccgggaaugcguc

SEQ ID NO: 3270 - RNA, 48 nt, Artificial Sequence
  Description of Artificial Sequence:  Nucleic Acid
ggaaggcaggaggaaacucccuucaaggacaucguccgggagcaaugc

SEQ ID NO: 3271 - RNA, 48 nt, Artificial Sequence
  Description of Artificial Sequence:  Nucleic Acid
cgggaaggggaggaaacucccuucaaggacaucguccgggacagcaau

SEQ ID NO: 3272 - RNA, 48 nt, Artificial Sequence
  Description of Artificial Sequence:  Nucleic Acid
cugagcugggaggaaacucccuucaaggacaucguccggggggaaggc

SEQ ID NO: 3273 - RNA, 48 nt, Artificial Sequence
  Description of Artificial Sequence:  Nucleic Acid
aagcugagggaggaaacucccuucaaggacaucguccgggugcgggaa

SEQ ID NO: 3274 - RNA, 48 nt, Artificial Sequence
  Description of Artificial Sequence:  Nucleic Acid
gacagaagggaggaaacucccuucaaggacaucguccgggugagcugc

SEQ ID NO: 3275 - RNA, 48 nt, Artificial Sequence
  Description of Artificial Sequence:  Nucleic Acid
cuuggggaggaggaaacucccuucaaggacaucguccgggagaagcug

SEQ ID NO: 3276 - RNA, 48 nt, Artificial Sequence
  Description of Artificial Sequence:  Nucleic Acid
ggugcuggggaggaaacucccuucaaggacaucguccggguuggggac

SEQ ID NO: 3277 - RNA, 48 nt, Artificial Sequence
  Description of Artificial Sequence:  Nucleic Acid
cuggggugggaggaaacucccuucaaggacaucguccggguggcuugg

SEQ ID NO: 3278 - RNA, 48 nt, Artificial Sequence
  Description of Artificial Sequence:  Nucleic Acid
ggauagggggaggaaacucccuucaaggacaucguccggguggggugc

SEQ ID NO: 3279 - RNA, 48 nt, Artificial Sequence
  Description of Artificial Sequence:  Nucleic Acid
agggaugaggaggaaacucccuucaaggacaucguccgggguaaaggg

SEQ ID NO: 3280 - RNA, 48 nt, Artificial Sequence
  Description of Artificial Sequence:  Nucleic Acid
auggugcuggaggaaacucccuucaaggacaucguccgggagggauga

SEQ ID NO: 3281 - RNA, 48 nt, Artificial Sequence
  Description of Artificial Sequence:  Nucleic Acid
ugauggugggaggaaacucccuucaaggacaucguccgggucagggau

SEQ ID NO: 3282 - RNA, 48 nt, Artificial Sequence
  Description of Artificial Sequence:  Nucleic Acid
aaacucauggaggaaacucccuucaaggacaucguccgggauaguuga

SEQ ID NO: 3283 - RNA, 48 nt, Artificial Sequence
  Description of Artificial Sequence:  Nucleic Acid
gggaaacuggaggaaacucccuucaaggacaucguccgggaucauagu

SEQ ID NO: 3284 - RNA, 48 nt, Artificial Sequence
  Description of Artificial Sequence:  Nucleic Acid
gugggaaaggaggaaacucccuucaaggacaucguccgggucaucaua

SEQ ID NO: 3285 - RNA, 48 nt, Artificial Sequence
  Description of Artificial Sequence:  Nucleic Acid
ggaaacacggaggaaacucccuucaaggacaucguccgggaugguggg

SEQ ID NO: 3286 - RNA, 48 nt, Artificial Sequence
  Description of Artificial Sequence:  Nucleic Acid
aggaaacaggaggaaacucccuucaaggacaucguccgggcauggugg

SEQ ID NO: 3287 - RNA, 48 nt, Artificial Sequence
  Description of Artificial Sequence:  Nucleic Acid
gaaggaaaggaggaaacucccuucaaggacaucguccgggaccauggu

SEQ ID NO: 3288 - RNA, 48 nt, Artificial Sequence
  Description of Artificial Sequence:  Nucleic Acid
gaucugccggaggaaacucccuucaaggacaucguccgggagaaggaa

SEQ ID NO: 3289 - RNA, 48 nt, Artificial Sequence
  Description of Artificial Sequence:  Nucleic Acid
ugaucugcggaggaaacucccuucaaggacaucguccgggcagaagga

SEQ ID NO: 3290 - RNA, 48 nt, Artificial Sequence
  Description of Artificial Sequence:  Nucleic Acid
cugaucugggaggaaacucccuucaaggacaucguccgggccagaagg

SEQ ID NO: 3291 - RNA, 48 nt, Artificial Sequence
  Description of Artificial Sequence:  Nucleic Acid
uggcugauggaggaaacucccuucaaggacaucguccgggugcccaga

SEQ ID NO: 3292 - RNA, 48 nt, Artificial Sequence
  Description of Artificial Sequence:  Nucleic Acid
aggccuggggaggaaacucccuucaaggacaucguccgggugaucugc

SEQ ID NO: 3293 - RNA, 48 nt, Artificial Sequence
  Description of Artificial Sequence:  Nucleic Acid
gccgaggcggaggaaacucccuucaaggacaucguccggguggcugau

SEQ ID NO: 3294 - RNA, 48 nt, Artificial Sequence
  Description of Artificial Sequence:  Nucleic Acid
ggccgaggggaggaaacucccuucaaggacaucguccgggcuggcuga

SEQ ID NO: 3295 - RNA, 48 nt, Artificial Sequence
  Description of Artificial Sequence:  Nucleic Acid
gccaaggcggaggaaacucccuucaaggacaucguccggggaggccug

SEQ ID NO: 3296 - RNA, 48 nt, Artificial Sequence
  Description of Artificial Sequence:  Nucleic Acid
ggccaaggggaggaaacucccuucaaggacaucguccgggcgaggccu

SEQ ID NO: 3297 - RNA, 48 nt, Artificial Sequence
  Description of Artificial Sequence:  Nucleic Acid
gccggggcggaggaaacucccuucaaggacaucguccgggaaggccga

SEQ ID NO: 3298 - RNA, 48 nt, Artificial Sequence
  Description of Artificial Sequence:  Nucleic Acid
ggccggggggaggaaacucccuucaaggacaucguccgggcaaggccg

SEQ ID NO: 3299 - RNA, 48 nt, Artificial Sequence
  Description of Artificial Sequence:  Nucleic Acid
ggaggggcggaggaaacucccuucaaggacaucguccgggggggccaa

SEQ ID NO: 3300 - RNA, 48 nt, Artificial Sequence
  Description of Artificial Sequence:  Nucleic Acid
gggaggggggaggaaacucccuucaaggacaucguccgggcggggcca

SEQ ID NO: 3301 - RNA, 48 nt, Artificial Sequence
  Description of Artificial Sequence:  Nucleic Acid
gggcaggaggaggaaacucccuucaaggacaucguccggguuggggag

SEQ ID NO: 3302 - RNA, 48 nt, Artificial Sequence
  Description of Artificial Sequence:  Nucleic Acid
gccuggggggaggaaacucccuucaaggacaucguccgggaggacuug

SEQ ID NO: 3303 - RNA, 48 nt, Artificial Sequence
  Description of Artificial Sequence:  Nucleic Acid
gcuggagcggaggaaacucccuucaaggacaucguccggguggggcag

SEQ ID NO: 3304 - RNA, 48 nt, Artificial Sequence
  Description of Artificial Sequence:  Nucleic Acid
ggcuggagggaggaaacucccuucaaggacaucguccgggcuggggca

SEQ ID NO: 3305 - RNA, 48 nt, Artificial Sequence
  Description of Artificial Sequence:  Nucleic Acid
ggcaggggggaggaaacucccuucaaggacaucguccggguggagccu

SEQ ID NO: 3306 - RNA, 48 nt, Artificial Sequence
  Description of Artificial Sequence:  Nucleic Acid
agcaggggggaggaaacucccuucaaggacaucguccgggaggggcug

SEQ ID NO: 3307 - RNA, 48 nt, Artificial Sequence
  Description of Artificial Sequence:  Nucleic Acid
ggcuggagggaggaaacucccuucaaggacaucguccgggaggggcag

SEQ ID NO: 3308 - RNA, 48 nt, Artificial Sequence
  Description of Artificial Sequence:  Nucleic Acid
uaccauggggaggaaacucccuucaaggacaucguccggguggagcag

SEQ ID NO: 3309 - RNA, 48 nt, Artificial Sequence
  Description of Artificial Sequence:  Nucleic Acid
gcugauacggaggaaacucccuucaaggacaucguccgggauggcugg

SEQ ID NO: 3310 - RNA, 48 nt, Artificial Sequence
  Description of Artificial Sequence:  Nucleic Acid
agcugauaggaggaaacucccuucaaggacaucguccgggcauggcug

SEQ ID NO: 3311 - RNA, 48 nt, Artificial Sequence
  Description of Artificial Sequence:  Nucleic Acid
ggccagagggaggaaacucccuucaaggacaucguccgggugauacca

SEQ ID NO: 3312 - RNA, 48 nt, Artificial Sequence
  Description of Artificial Sequence:  Nucleic Acid
gccugggcggaggaaacucccuucaaggacaucguccgggagagcuga

SEQ ID NO: 3313 - RNA, 48 nt, Artificial Sequence
  Description of Artificial Sequence:  Nucleic Acid
ggccugggggaggaaacucccuucaaggacaucguccgggcagagcug

SEQ ID NO: 3314 - RNA, 48 nt, Artificial Sequence
  Description of Artificial Sequence:  Nucleic Acid
gcuggggcggaggaaacucccuucaaggacaucguccgggugggccag

SEQ ID NO: 3315 - RNA, 48 nt, Artificial Sequence
  Description of Artificial Sequence:  Nucleic Acid
ggcuggggggaggaaacucccuucaaggacaucguccgggcugggcca

SEQ ID NO: 3316 - RNA, 48 nt, Artificial Sequence
  Description of Artificial Sequence:  Nucleic Acid
gacaggggggaggaaacucccuucaaggacaucguccggguggggccu

SEQ ID NO: 3317 - RNA, 48 nt, Artificial Sequence
  Description of Artificial Sequence:  Nucleic Acid
gacugggaggaggaaacucccuucaaggacaucguccgggaggggcug

SEQ ID NO: 3318 - RNA, 48 nt, Artificial Sequence
  Description of Artificial Sequence:  Nucleic Acid
ggcuaggaggaggaaacucccuucaaggacaucguccgggugggacag

SEQ ID NO: 3319 - RNA, 48 nt, Artificial Sequence
  Description of Artificial Sequence:  Nucleic Acid
gccuggggggaggaaacucccuucaaggacaucguccggguaggacug

SEQ ID NO: 3320 - RNA, 48 nt, Artificial Sequence
  Description of Artificial Sequence:  Nucleic Acid
aggagggcggaggaaacucccuucaaggacaucguccggguggggcua

SEQ ID NO: 3321 - RNA, 48 nt, Artificial Sequence
  Description of Artificial Sequence:  Nucleic Acid
gaggagggggaggaaacucccuucaaggacaucguccgggcuggggcu

SEQ ID NO: 3322 - RNA, 48 nt, Artificial Sequence
  Description of Artificial Sequence:  Nucleic Acid
gccacagcggaggaaacucccuucaaggacaucguccgggugaggagg

SEQ ID NO: 3323 - RNA, 48 nt, Artificial Sequence
  Description of Artificial Sequence:  Nucleic Acid
ggccacagggaggaaacucccuucaaggacaucguccgggcugaggag

SEQ ID NO: 3324 - RNA, 48 nt, Artificial Sequence
  Description of Artificial Sequence:  Nucleic Acid
uggggccaggaggaaacucccuucaaggacaucguccgggagccugag

SEQ ID NO: 3325 - RNA, 48 nt, Artificial Sequence
  Description of Artificial Sequence:  Nucleic Acid
gguggggcggaggaaacucccuucaaggacaucguccgggacagccug

SEQ ID NO: 3326 - RNA, 48 nt, Artificial Sequence
  Description of Artificial Sequence:  Nucleic Acid
agguggggggaggaaacucccuucaaggacaucguccgggcacagccu

SEQ ID NO: 3327 - RNA, 48 nt, Artificial Sequence
  Description of Artificial Sequence:  Nucleic Acid
cuugggggggaggaaacucccuucaaggacaucguccgggaggugggg

SEQ ID NO: 3328 - RNA, 48 nt, Artificial Sequence
  Description of Artificial Sequence:  Nucleic Acid
ugggugggggaggaaacucccuucaaggacaucguccggguugggggc

SEQ ID NO: 3329 - RNA, 48 nt, Artificial Sequence
  Description of Artificial Sequence:  Nucleic Acid
uccccagcggaggaaacucccuucaaggacaucguccggguggguggg

SEQ ID NO: 3330 - RNA, 48 nt, Artificial Sequence
  Description of Artificial Sequence:  Nucleic Acid
uuccccagggaggaaacucccuucaaggacaucguccgggcugggugg

SEQ ID NO: 3331 - RNA, 48 nt, Artificial Sequence
  Description of Artificial Sequence:  Nucleic Acid
uccuucccggaggaaacucccuucaaggacaucguccgggagccuggg

SEQ ID NO: 3332 - RNA, 48 nt, Artificial Sequence
  Description of Artificial Sequence:  Nucleic Acid
uuccuuccggaggaaacucccuucaaggacaucguccgggcagccugg

SEQ ID NO: 3333 - RNA, 48 nt, Artificial Sequence
  Description of Artificial Sequence:  Nucleic Acid
guuccuucggaggaaacucccuucaaggacaucguccgggccagccug

SEQ ID NO: 3334 - RNA, 48 nt, Artificial Sequence
  Description of Artificial Sequence:  Nucleic Acid
cguuccuuggaggaaacucccuucaaggacaucguccgggcccagccu

SEQ ID NO: 3335 - RNA, 48 nt, Artificial Sequence
  Description of Artificial Sequence:  Nucleic Acid
cagcguucggaggaaacucccuucaaggacaucguccggguuccccag

SEQ ID NO: 3336 - RNA, 48 nt, Artificial Sequence
  Description of Artificial Sequence:  Nucleic Acid
acagcguuggaggaaacucccuucaaggacaucguccgggcuucccca

SEQ ID NO: 3337 - RNA, 48 nt, Artificial Sequence
  Description of Artificial Sequence:  Nucleic Acid
ucugacagggaggaaacucccuucaaggacaucguccgggguuccuuc

SEQ ID NO: 3338 - RNA, 48 nt, Artificial Sequence
  Description of Artificial Sequence:  Nucleic Acid
gccucugaggaggaaacucccuucaaggacaucguccgggagcguucc

SEQ ID NO: 3339 - RNA, 48 nt, Artificial Sequence
  Description of Artificial Sequence:  Nucleic Acid
cagggccuggaggaaacucccuucaaggacaucguccgggugacagcg

SEQ ID NO: 3340 - RNA, 48 nt, Artificial Sequence
  Description of Artificial Sequence:  Nucleic Acid
agcagggcggaggaaacucccuucaaggacaucguccgggucugacag

SEQ ID NO: 3341 - RNA, 48 nt, Artificial Sequence
  Description of Artificial Sequence:  Nucleic Acid
cagcagggggaggaaacucccuucaaggacaucguccgggcucugaca

SEQ ID NO: 3342 - RNA, 48 nt, Artificial Sequence
  Description of Artificial Sequence:  Nucleic Acid
agcugcagggaggaaacucccuucaaggacaucguccgggagggccuc

SEQ ID NO: 3343 - RNA, 48 nt, Artificial Sequence
  Description of Artificial Sequence:  Nucleic Acid
ugcagcugggaggaaacucccuucaaggacaucguccgggagcagggc

SEQ ID NO: 3344 - RNA, 48 nt, Artificial Sequence
  Description of Artificial Sequence:  Nucleic Acid
aacugcagggaggaaacucccuucaaggacaucguccgggugcagcag

SEQ ID NO: 3345 - RNA, 48 nt, Artificial Sequence
  Description of Artificial Sequence:  Nucleic Acid
ucaaacugggaggaaacucccuucaaggacaucguccgggagcugcag

SEQ ID NO: 3346 - RNA, 48 nt, Artificial Sequence
  Description of Artificial Sequence:  Nucleic Acid
ucaucaaaggaggaaacucccuucaaggacaucguccgggugcagcug

SEQ ID NO: 3347 - RNA, 48 nt, Artificial Sequence
  Description of Artificial Sequence:  Nucleic Acid
uucaucauggaggaaacucccuucaaggacaucguccgggaaacugca

SEQ ID NO: 3348 - RNA, 48 nt, Artificial Sequence
  Description of Artificial Sequence:  Nucleic Acid
gucuucauggaggaaacucccuucaaggacaucguccgggaucaaacu

SEQ ID NO: 3349 - RNA, 48 nt, Artificial Sequence
  Description of Artificial Sequence:  Nucleic Acid
caggucuuggaggaaacucccuucaaggacaucguccgggaucaucaa

SEQ ID NO: 3350 - RNA, 48 nt, Artificial Sequence
  Description of Artificial Sequence:  Nucleic Acid
ccccagguggaggaaacucccuucaaggacaucguccggguucaucau

SEQ ID NO: 3351 - RNA, 48 nt, Artificial Sequence
  Description of Artificial Sequence:  Nucleic Acid
aaggccccggaggaaacucccuucaaggacaucguccgggaggucuuc

SEQ ID NO: 3352 - RNA, 48 nt, Artificial Sequence
  Description of Artificial Sequence:  Nucleic Acid
caaggcccggaggaaacucccuucaaggacaucguccgggcaggucuu

SEQ ID NO: 3353 - RNA, 48 nt, Artificial Sequence
  Description of Artificial Sequence:  Nucleic Acid
gcaaggccggaggaaacucccuucaaggacaucguccgggccaggucu

SEQ ID NO: 3354 - RNA, 48 nt, Artificial Sequence
  Description of Artificial Sequence:  Nucleic Acid
agcaaggcggaggaaacucccuucaaggacaucguccgggcccagguc

SEQ ID NO: 3355 - RNA, 48 nt, Artificial Sequence
  Description of Artificial Sequence:  Nucleic Acid
aagcaaggggaggaaacucccuucaaggacaucguccgggccccaggu

SEQ ID NO: 3356 - RNA, 48 nt, Artificial Sequence
  Description of Artificial Sequence:  Nucleic Acid
uugccaagggaggaaacucccuucaaggacaucguccgggaaggcccc

SEQ ID NO: 3357 - RNA, 48 nt, Artificial Sequence
  Description of Artificial Sequence:  Nucleic Acid
gcuguugcggaggaaacucccuucaaggacaucguccgggaagcaagg

SEQ ID NO: 3358 - RNA, 48 nt, Artificial Sequence
  Description of Artificial Sequence:  Nucleic Acid
ugcuguugggaggaaacucccuucaaggacaucguccgggcaagcaag

SEQ ID NO: 3359 - RNA, 48 nt, Artificial Sequence
  Description of Artificial Sequence:  Nucleic Acid
ggucugugggaggaaacucccuucaaggacaucguccggguguugcca

SEQ ID NO: 3360 - RNA, 48 nt, Artificial Sequence
  Description of Artificial Sequence:  Nucleic Acid
agcuggguggaggaaacucccuucaaggacaucguccgggugugcugu

SEQ ID NO: 3361 - RNA, 48 nt, Artificial Sequence
  Description of Artificial Sequence:  Nucleic Acid
gaacacagggaggaaacucccuucaaggacaucguccgggugggucug

SEQ ID NO: 3362 - RNA, 48 nt, Artificial Sequence
  Description of Artificial Sequence:  Nucleic Acid
ugugaacaggaggaaacucccuucaaggacaucguccgggagcugggu

SEQ ID NO: 3363 - RNA, 48 nt, Artificial Sequence
  Description of Artificial Sequence:  Nucleic Acid
ucugugaaggaggaaacucccuucaaggacaucguccgggacagcugg

SEQ ID NO: 3364 - RNA, 48 nt, Artificial Sequence
  Description of Artificial Sequence:  Nucleic Acid
ugccagguggaggaaacucccuucaaggacaucguccgggugugaaca

SEQ ID NO: 3365 - RNA, 48 nt, Artificial Sequence
  Description of Artificial Sequence:  Nucleic Acid
acggaugcggaggaaacucccuucaaggacaucguccgggaggucugu

SEQ ID NO: 3366 - RNA, 48 nt, Artificial Sequence
  Description of Artificial Sequence:  Nucleic Acid
gacggaugggaggaaacucccuucaaggacaucguccgggcaggucug

SEQ ID NO: 3367 - RNA, 48 nt, Artificial Sequence
  Description of Artificial Sequence:  Nucleic Acid
guugucgaggaggaaacucccuucaaggacaucguccgggggaugcca

SEQ ID NO: 3368 - RNA, 48 nt, Artificial Sequence
  Description of Artificial Sequence:  Nucleic Acid
ggaguuguggaggaaacucccuucaaggacaucguccggggacggaug

SEQ ID NO: 3369 - RNA, 48 nt, Artificial Sequence
  Description of Artificial Sequence:  Nucleic Acid
cugaaacuggaggaaacucccuucaaggacaucguccgggggaguugu

SEQ ID NO: 3370 - RNA, 48 nt, Artificial Sequence
  Description of Artificial Sequence:  Nucleic Acid
ugcugaaaggaggaaacucccuucaaggacaucguccgggucggaguu

SEQ ID NO: 3371 - RNA, 48 nt, Artificial Sequence
  Description of Artificial Sequence:  Nucleic Acid
agcagcugggaggaaacucccuucaaggacaucguccgggugaaacuc

SEQ ID NO: 3372 - RNA, 48 nt, Artificial Sequence
  Description of Artificial Sequence:  Nucleic Acid
uucagcagggaggaaacucccuucaaggacaucguccgggugcugaaa

SEQ ID NO: 3373 - RNA, 48 nt, Artificial Sequence
  Description of Artificial Sequence:  Nucleic Acid
ugguucagggaggaaacucccuucaaggacaucguccgggagcugcug

SEQ ID NO: 3374 - RNA, 48 nt, Artificial Sequence
  Description of Artificial Sequence:  Nucleic Acid
cccugguuggaggaaacucccuucaaggacaucguccgggagcagcug

SEQ ID NO: 3375 - RNA, 48 nt, Artificial Sequence
  Description of Artificial Sequence:  Nucleic Acid
gguaugccggaggaaacucccuucaaggacaucguccgggugguucag

SEQ ID NO: 3376 - RNA, 48 nt, Artificial Sequence
  Description of Artificial Sequence:  Nucleic Acid
agguaugcggaggaaacucccuucaaggacaucguccgggcugguuca

SEQ ID NO: 3377 - RNA, 48 nt, Artificial Sequence
  Description of Artificial Sequence:  Nucleic Acid
cagguaugggaggaaacucccuucaaggacaucguccgggccugguuc

SEQ ID NO: 3378 - RNA, 48 nt, Artificial Sequence
  Description of Artificial Sequence:  Nucleic Acid
gggggccaggaggaaacucccuucaaggacaucguccgggagguaugc

SEQ ID NO: 3379 - RNA, 48 nt, Artificial Sequence
  Description of Artificial Sequence:  Nucleic Acid
uggggggcggaggaaacucccuucaaggacaucguccgggacagguau

SEQ ID NO: 3380 - RNA, 48 nt, Artificial Sequence
  Description of Artificial Sequence:  Nucleic Acid
guggggggggaggaaacucccuucaaggacaucguccgggcacaggua

SEQ ID NO: 3381 - RNA, 48 nt, Artificial Sequence
  Description of Artificial Sequence:  Nucleic Acid
caugggcuggaggaaacucccuucaaggacaucguccgggaguugugu

SEQ ID NO: 3382 - RNA, 48 nt, Artificial Sequence
  Description of Artificial Sequence:  Nucleic Acid
agcaugggggaggaaacucccuucaaggacaucguccgggucaguugu

SEQ ID NO: 3383 - RNA, 48 nt, Artificial Sequence
  Description of Artificial Sequence:  Nucleic Acid
uccaucagggaggaaacucccuucaaggacaucguccgggaugggcuc

SEQ ID NO: 3384 - RNA, 48 nt, Artificial Sequence
  Description of Artificial Sequence:  Nucleic Acid
uacuccauggaggaaacucccuucaaggacaucguccgggagcauggg

SEQ ID NO: 3385 - RNA, 48 nt, Artificial Sequence
  Description of Artificial Sequence:  Nucleic Acid
ggguacucggaggaaacucccuucaaggacaucguccgggaucagcau

SEQ ID NO: 3386 - RNA, 48 nt, Artificial Sequence
  Description of Artificial Sequence:  Nucleic Acid
aggguacuggaggaaacucccuucaaggacaucguccgggcaucagca

SEQ ID NO: 3387 - RNA, 48 nt, Artificial Sequence
  Description of Artificial Sequence:  Nucleic Acid
ucaggguaggaggaaacucccuucaaggacaucguccggguccaucag

SEQ ID NO: 3388 - RNA, 48 nt, Artificial Sequence
  Description of Artificial Sequence:  Nucleic Acid
uauagccuggaggaaacucccuucaaggacaucguccgggaggguacu

SEQ ID NO: 3389 - RNA, 48 nt, Artificial Sequence
  Description of Artificial Sequence:  Nucleic Acid
guuauagcggaggaaacucccuucaaggacaucguccgggucagggua

SEQ ID NO: 3390 - RNA, 48 nt, Artificial Sequence
  Description of Artificial Sequence:  Nucleic Acid
aguuauagggaggaaacucccuucaaggacaucguccgggcucagggu

SEQ ID NO: 3391 - RNA, 48 nt, Artificial Sequence
  Description of Artificial Sequence:  Nucleic Acid
ucacuaggggaggaaacucccuucaaggacaucguccggggaguuaua

SEQ ID NO: 3392 - RNA, 48 nt, Artificial Sequence
  Description of Artificial Sequence:  Nucleic Acid
ggcugucaggaggaaacucccuucaaggacaucguccggguaggcgag

SEQ ID NO: 3393 - RNA, 48 nt, Artificial Sequence
  Description of Artificial Sequence:  Nucleic Acid
ugggcuguggaggaaacucccuucaaggacaucguccgggacuaggcg

SEQ ID NO: 3394 - RNA, 48 nt, Artificial Sequence
  Description of Artificial Sequence:  Nucleic Acid
ccucugggggaggaaacucccuucaaggacaucguccgggugucacua

SEQ ID NO: 3395 - RNA, 48 nt, Artificial Sequence
  Description of Artificial Sequence:  Nucleic Acid
gggggccuggaggaaacucccuucaaggacaucguccgggugggcugu

SEQ ID NO: 3396 - RNA, 48 nt, Artificial Sequence
  Description of Artificial Sequence:  Nucleic Acid
cggggggcggaggaaacucccuucaaggacaucguccgggucugggcu

SEQ ID NO: 3397 - RNA, 48 nt, Artificial Sequence
  Description of Artificial Sequence:  Nucleic Acid
ucggggggggaggaaacucccuucaaggacaucguccgggcucugggc

SEQ ID NO: 3398 - RNA, 48 nt, Artificial Sequence
  Description of Artificial Sequence:  Nucleic Acid
agcuggguggaggaaacucccuucaaggacaucguccgggggggggcc

SEQ ID NO: 3399 - RNA, 48 nt, Artificial Sequence
  Description of Artificial Sequence:  Nucleic Acid
agcaggagggaggaaacucccuucaaggacaucguccgggugggucgg

SEQ ID NO: 3400 - RNA, 48 nt, Artificial Sequence
  Description of Artificial Sequence:  Nucleic Acid
caguggagggaggaaacucccuucaaggacaucguccgggaggagcug

SEQ ID NO: 3401 - RNA, 48 nt, Artificial Sequence
  Description of Artificial Sequence:  Nucleic Acid
ggggccccggaggaaacucccuucaaggacaucguccgggaguggagc

SEQ ID NO: 3402 - RNA, 48 nt, Artificial Sequence
  Description of Artificial Sequence:  Nucleic Acid
cggggcccggaggaaacucccuucaaggacaucguccgggcaguggag

SEQ ID NO: 3403 - RNA, 48 nt, Artificial Sequence
  Description of Artificial Sequence:  Nucleic Acid
ccggggccggaggaaacucccuucaaggacaucguccgggccagugga

SEQ ID NO: 3404 - RNA, 48 nt, Artificial Sequence
  Description of Artificial Sequence:  Nucleic Acid
cccggggcggaggaaacucccuucaaggacaucguccgggcccagugg

SEQ ID NO: 3405 - RNA, 48 nt, Artificial Sequence
  Description of Artificial Sequence:  Nucleic Acid
ccccggggggaggaaacucccuucaaggacaucguccgggccccagug

SEQ ID NO: 3406 - RNA, 48 nt, Artificial Sequence
  Description of Artificial Sequence:  Nucleic Acid
gggagcccggaggaaacucccuucaaggacaucguccgggggggcccc

SEQ ID NO: 3407 - RNA, 48 nt, Artificial Sequence
  Description of Artificial Sequence:  Nucleic Acid
ggggagccggaggaaacucccuucaaggacaucguccgggcggggccc

SEQ ID NO: 3408 - RNA, 48 nt, Artificial Sequence
  Description of Artificial Sequence:  Nucleic Acid
uggggagcggaggaaacucccuucaaggacaucguccgggccggggcc

SEQ ID NO: 3409 - RNA, 48 nt, Artificial Sequence
  Description of Artificial Sequence:  Nucleic Acid
uuggggagggaggaaacucccuucaaggacaucguccgggcccggggc

SEQ ID NO: 3410 - RNA, 48 nt, Artificial Sequence
  Description of Artificial Sequence:  Nucleic Acid
aaggaggcggaggaaacucccuucaaggacaucguccgggauugggga

SEQ ID NO: 3411 - RNA, 48 nt, Artificial Sequence
  Description of Artificial Sequence:  Nucleic Acid
aaaggaggggaggaaacucccuucaaggacaucguccgggcauugggg

SEQ ID NO: 3412 - RNA, 48 nt, Artificial Sequence
  Description of Artificial Sequence:  Nucleic Acid
uucaucucggaggaaacucccuucaaggacaucguccgggugaaagga

SEQ ID NO: 3413 - RNA, 48 nt, Artificial Sequence
  Description of Artificial Sequence:  Nucleic Acid
cuucaucuggaggaaacucccuucaaggacaucguccgggcugaaagg

SEQ ID NO: 3414 - RNA, 48 nt, Artificial Sequence
  Description of Artificial Sequence:  Nucleic Acid
gucuucauggaggaaacucccuucaaggacaucguccggguccugaaa

SEQ ID NO: 3415 - RNA, 48 nt, Artificial Sequence
  Description of Artificial Sequence:  Nucleic Acid
gaagucuuggaggaaacucccuucaaggacaucguccgggaucuccug

SEQ ID NO: 3416 - RNA, 48 nt, Artificial Sequence
  Description of Artificial Sequence:  Nucleic Acid
ggagaaguggaggaaacucccuucaaggacaucguccggguucaucuc

SEQ ID NO: 3417 - RNA, 48 nt, Artificial Sequence
  Description of Artificial Sequence:  Nucleic Acid
cauguccgggaggaaacucccuucaaggacaucguccgggaauggagg

SEQ ID NO: 3418 - RNA, 48 nt, Artificial Sequence
  Description of Artificial Sequence:  Nucleic Acid
uccaugucggaggaaacucccuucaaggacaucguccggggcaaugga

SEQ ID NO: 3419 - RNA, 48 nt, Artificial Sequence
  Description of Artificial Sequence:  Nucleic Acid
guccauguggaggaaacucccuucaaggacaucguccgggcgcaaugg

SEQ ID NO: 3420 - RNA, 48 nt, Artificial Sequence
  Description of Artificial Sequence:  Nucleic Acid
gagaagucggaggaaacucccuucaaggacaucguccgggauguccgc

SEQ ID NO: 3421 - RNA, 48 nt, Artificial Sequence
  Description of Artificial Sequence:  Nucleic Acid
ugagaaguggaggaaacucccuucaaggacaucguccgggcauguccg

SEQ ID NO: 3422 - RNA, 48 nt, Artificial Sequence
  Description of Artificial Sequence:  Nucleic Acid
cagcagggggaggaaacucccuucaaggacaucguccgggugagaagu

SEQ ID NO: 3423 - RNA, 48 nt, Artificial Sequence
  Description of Artificial Sequence:  Nucleic Acid
ugacucagggaggaaacucccuucaaggacaucguccgggagggcuga

SEQ ID NO: 3424 - RNA, 48 nt, Artificial Sequence
  Description of Artificial Sequence:  Nucleic Acid
aucugacuggaggaaacucccuucaaggacaucguccgggagcagggc

SEQ ID NO: 3425 - RNA, 48 nt, Artificial Sequence
  Description of Artificial Sequence:  Nucleic Acid
ugaucugaggaggaaacucccuucaaggacaucguccgggucagcagg

SEQ ID NO: 3426 - RNA, 48 nt, Artificial Sequence
  Description of Artificial Sequence:  Nucleic Acid
gagcugauggaggaaacucccuucaaggacaucguccgggugacucag

SEQ ID NO: 3427 - RNA, 48 nt, Artificial Sequence
  Description of Artificial Sequence:  Nucleic Acid
cuuaggagggaggaaacucccuucaaggacaucguccgggugaucuga

SEQ ID NO: 3428 - RNA, 48 nt, Artificial Sequence
  Description of Artificial Sequence:  Nucleic Acid
gucaccccggaggaaacucccuucaaggacaucguccggguuaggagc

SEQ ID NO: 3429 - RNA, 48 nt, Artificial Sequence
  Description of Artificial Sequence:  Nucleic Acid
cgucacccggaggaaacucccuucaaggacaucguccgggcuuaggag

SEQ ID NO: 3430 - RNA, 48 nt, Artificial Sequence
  Description of Artificial Sequence:  Nucleic Acid
gcgucaccggaggaaacucccuucaaggacaucguccgggccuuagga

SEQ ID NO: 3431 - RNA, 48 nt, Artificial Sequence
  Description of Artificial Sequence:  Nucleic Acid
ggcgucacggaggaaacucccuucaaggacaucguccgggcccuuagg

SEQ ID NO: 3432 - RNA, 48 nt, Artificial Sequence
  Description of Artificial Sequence:  Nucleic Acid
aggcgucaggaggaaacucccuucaaggacaucguccgggccccuuag

SEQ ID NO: 3433 - RNA, 48 nt, Artificial Sequence
  Description of Artificial Sequence:  Nucleic Acid
gcaggcguggaggaaacucccuucaaggacaucguccgggacccccuu

SEQ ID NO: 3434 - RNA, 48 nt, Artificial Sequence
  Description of Artificial Sequence:  Nucleic Acid
agggcaggggaggaaacucccuucaaggacaucguccggggucacccc

SEQ ID NO: 3435 - RNA, 48 nt, Artificial Sequence
  Description of Artificial Sequence:  Nucleic Acid
ggggagggggaggaaacucccuucaaggacaucguccgggaggcguca

SEQ ID NO: 3436 - RNA, 48 nt, Artificial Sequence
  Description of Artificial Sequence:  Nucleic Acid
ccagugcuggaggaaacucccuucaaggacaucguccggguggggagg

SEQ ID NO: 3437 - RNA, 48 nt, Artificial Sequence
  Description of Artificial Sequence:  Nucleic Acid
aaccagugggaggaaacucccuucaaggacaucguccgggucugggga

SEQ ID NO: 3438 - RNA, 48 nt, Artificial Sequence
  Description of Artificial Sequence:  Nucleic Acid
ccugcaacggaggaaacucccuucaaggacaucguccgggagugcucu

SEQ ID NO: 3439 - RNA, 48 nt, Artificial Sequence
  Description of Artificial Sequence:  Nucleic Acid
cccugcaaggaggaaacucccuucaaggacaucguccgggcagugcuc

SEQ ID NO: 3440 - RNA, 48 nt, Artificial Sequence
  Description of Artificial Sequence:  Nucleic Acid
auccccugggaggaaacucccuucaaggacaucguccgggaaccagug

SEQ ID NO: 3441 - RNA, 48 nt, Artificial Sequence
  Description of Artificial Sequence:  Nucleic Acid
ucaaucccggaggaaacucccuucaaggacaucguccgggugcaacca

SEQ ID NO: 3442 - RNA, 48 nt, Artificial Sequence
  Description of Artificial Sequence:  Nucleic Acid
uucaauccggaggaaacucccuucaaggacaucguccgggcugcaacc

SEQ ID NO: 3443 - RNA, 48 nt, Artificial Sequence
  Description of Artificial Sequence:  Nucleic Acid
cuucaaucggaggaaacucccuucaaggacaucguccgggccugcaac

SEQ ID NO: 3444 - RNA, 48 nt, Artificial Sequence
  Description of Artificial Sequence:  Nucleic Acid
gcuucaauggaggaaacucccuucaaggacaucguccgggcccugcaa

SEQ ID NO: 3445 - RNA, 48 nt, Artificial Sequence
  Description of Artificial Sequence:  Nucleic Acid
gagggcuuggaggaaacucccuucaaggacaucguccgggaauccccu

SEQ ID NO: 3446 - RNA, 48 nt, Artificial Sequence
  Description of Artificial Sequence:  Nucleic Acid
uuggagggggaggaaacucccuucaaggacaucguccggguucaaucc

SEQ ID NO: 3447 - RNA, 48 nt, Artificial Sequence
  Description of Artificial Sequence:  Nucleic Acid
cguaagugggaggaaacucccuucaaggacaucguccggguuuuggag

SEQ ID NO: 3448 - RNA, 48 nt, Artificial Sequence
  Description of Artificial Sequence:  Nucleic Acid
ccagaaucggaggaaacucccuucaaggacaucguccgggguaagugc

SEQ ID NO: 3449 - RNA, 48 nt, Artificial Sequence
  Description of Artificial Sequence:  Nucleic Acid
accagaauggaggaaacucccuucaaggacaucguccgggcguaagug

SEQ ID NO: 3450 - RNA, 48 nt, Artificial Sequence
  Description of Artificial Sequence:  Nucleic Acid
caccccacggaggaaacucccuucaaggacaucguccgggagaauccg

SEQ ID NO: 3451 - RNA, 48 nt, Artificial Sequence
  Description of Artificial Sequence:  Nucleic Acid
acaccccaggaggaaacucccuucaaggacaucguccgggcagaaucc

SEQ ID NO: 3452 - RNA, 48 nt, Artificial Sequence
  Description of Artificial Sequence:  Nucleic Acid
acacacccggaggaaacucccuucaaggacaucguccgggaccagaau

SEQ ID NO: 3453 - RNA, 48 nt, Artificial Sequence
  Description of Artificial Sequence:  Nucleic Acid
aacacaccggaggaaacucccuucaaggacaucguccgggcaccagaa

SEQ ID NO: 3454 - RNA, 48 nt, Artificial Sequence
  Description of Artificial Sequence:  Nucleic Acid
gaacacacggaggaaacucccuucaaggacaucguccgggccaccaga

SEQ ID NO: 3455 - RNA, 48 nt, Artificial Sequence
  Description of Artificial Sequence:  Nucleic Acid
ggaacacaggaggaaacucccuucaaggacaucguccgggcccaccag

SEQ ID NO: 3456 - RNA, 48 nt, Artificial Sequence
  Description of Artificial Sequence:  Nucleic Acid
uuggaacaggaggaaacucccuucaaggacaucguccgggaccccacc

SEQ ID NO: 3457 - RNA, 48 nt, Artificial Sequence
  Description of Artificial Sequence:  Nucleic Acid
aguuggaaggaggaaacucccuucaaggacaucguccgggacacccca

SEQ ID NO: 3458 - RNA, 48 nt, Artificial Sequence
  Description of Artificial Sequence:  Nucleic Acid
guugggggggaggaaacucccuucaaggacaucguccgggaguuggaa

SEQ ID NO: 3459 - RNA, 48 nt, Artificial Sequence
  Description of Artificial Sequence:  Nucleic Acid
gacauccaggaggaaacucccuucaaggacaucguccgggaaaguugg

SEQ ID NO: 3460 - RNA, 48 nt, Artificial Sequence
  Description of Artificial Sequence:  Nucleic Acid
aagacaucggaggaaacucccuucaaggacaucguccgggacaaaguu

SEQ ID NO: 3461 - RNA, 48 nt, Artificial Sequence
  Description of Artificial Sequence:  Nucleic Acid
gaagacauggaggaaacucccuucaaggacaucguccgggcacaaagu

SEQ ID NO: 3462 - RNA, 48 nt, Artificial Sequence
  Description of Artificial Sequence:  Nucleic Acid
aaggaagaggaggaaacucccuucaaggacaucguccgggauccacaa

SEQ ID NO: 3463 - RNA, 48 nt, Artificial Sequence
  Description of Artificial Sequence:  Nucleic Acid
ccccccucggaggaaacucccuucaaggacaucguccgggaaggaaga

SEQ ID NO: 3464 - RNA, 48 nt, Artificial Sequence
  Description of Artificial Sequence:  Nucleic Acid
uccccccuggaggaaacucccuucaaggacaucguccgggcaaggaag

SEQ ID NO: 3465 - RNA, 48 nt, Artificial Sequence
  Description of Artificial Sequence:  Nucleic Acid
gcucccccggaggaaacucccuucaaggacaucguccggguccaagga

SEQ ID NO: 3466 - RNA, 48 nt, Artificial Sequence
  Description of Artificial Sequence:  Nucleic Acid
ggcuccccggaggaaacucccuucaaggacaucguccgggcuccaagg

SEQ ID NO: 3467 - RNA, 48 nt, Artificial Sequence
  Description of Artificial Sequence:  Nucleic Acid
uggcucccggaggaaacucccuucaaggacaucguccgggccuccaag

SEQ ID NO: 3468 - RNA, 48 nt, Artificial Sequence
  Description of Artificial Sequence:  Nucleic Acid
auggcuccggaggaaacucccuucaaggacaucguccgggcccuccaa

SEQ ID NO: 3469 - RNA, 48 nt, Artificial Sequence
  Description of Artificial Sequence:  Nucleic Acid
uauggcucggaggaaacucccuucaaggacaucguccgggccccucca

SEQ ID NO: 3470 - RNA, 48 nt, Artificial Sequence
  Description of Artificial Sequence:  Nucleic Acid
auauggcuggaggaaacucccuucaaggacaucguccgggcccccucc

SEQ ID NO: 3471 - RNA, 48 nt, Artificial Sequence
  Description of Artificial Sequence:  Nucleic Acid
aaauauggggaggaaacucccuucaaggacaucguccggguccccccu

SEQ ID NO: 3472 - RNA, 48 nt, Artificial Sequence
  Description of Artificial Sequence:  Nucleic Acid
gauacugaggaggaaacucccuucaaggacaucguccgggaauaaaag

SEQ ID NO: 3473 - RNA, 48 nt, Artificial Sequence
  Description of Artificial Sequence:  Nucleic Acid
uacagauaggaggaaacucccuucaaggacaucguccgggugacaaua

SEQ ID NO: 3474 - RNA, 48 nt, Artificial Sequence
  Description of Artificial Sequence:  Nucleic Acid
gagagauaggaggaaacucccuucaaggacaucguccgggagauacug

SEQ ID NO: 3475 - RNA, 48 nt, Artificial Sequence
  Description of Artificial Sequence:  Nucleic Acid
agcaccucggaggaaacucccuucaaggacaucguccgggaaaaagag

SEQ ID NO: 3476 - RNA, 48 nt, Artificial Sequence
  Description of Artificial Sequence:  Nucleic Acid
aagcaccuggaggaaacucccuucaaggacaucguccgggcaaaaaga

SEQ ID NO: 3477 - RNA, 48 nt, Artificial Sequence
  Description of Artificial Sequence:  Nucleic Acid
uuaagcacggaggaaacucccuucaaggacaucguccggguccaaaaa

SEQ ID NO: 3478 - RNA, 48 nt, Artificial Sequence
  Description of Artificial Sequence:  Nucleic Acid
cuuaagcaggaggaaacucccuucaaggacaucguccgggcuccaaaa

SEQ ID NO: 3479 - RNA, 48 nt, Artificial Sequence
  Description of Artificial Sequence:  Nucleic Acid
ugcuuaagggaggaaacucccuucaaggacaucguccgggaccuccaa

SEQ ID NO: 3480 - RNA, 48 nt, Artificial Sequence
  Description of Artificial Sequence:  Nucleic Acid
ugcuucugggaggaaacucccuucaaggacaucguccggguuaagcac

SEQ ID NO: 3481 - RNA, 48 nt, Artificial Sequence
  Description of Artificial Sequence:  Nucleic Acid
uaaugcuuggaggaaacucccuucaaggacaucguccgggugcuuaag

SEQ ID NO: 3482 - RNA, 48 nt, Artificial Sequence
  Description of Artificial Sequence:  Nucleic Acid
aguuaaugggaggaaacucccuucaaggacaucguccggguucugcuu

SEQ ID NO: 3483 - RNA, 48 nt, Artificial Sequence
  Description of Artificial Sequence:  Nucleic Acid
ccccuuucggaggaaacucccuucaaggacaucguccgggagagaagu

SEQ ID NO: 3484 - RNA, 48 nt, Artificial Sequence
  Description of Artificial Sequence:  Nucleic Acid
cccccuuuggaggaaacucccuucaaggacaucguccgggcagagaag

SEQ ID NO: 3485 - RNA, 48 nt, Artificial Sequence
  Description of Artificial Sequence:  Nucleic Acid
gcucccccggaggaaacucccuucaaggacaucguccggguuuccaga

SEQ ID NO: 3486 - RNA, 48 nt, Artificial Sequence
  Description of Artificial Sequence:  Nucleic Acid
agcuccccggaggaaacucccuucaaggacaucguccgggcuuuccag

SEQ ID NO: 3487 - RNA, 48 nt, Artificial Sequence
  Description of Artificial Sequence:  Nucleic Acid
cagcucccggaggaaacucccuucaaggacaucguccgggccuuucca

SEQ ID NO: 3488 - RNA, 48 nt, Artificial Sequence
  Description of Artificial Sequence:  Nucleic Acid
ccagcuccggaggaaacucccuucaaggacaucguccgggcccuuucc

SEQ ID NO: 3489 - RNA, 48 nt, Artificial Sequence
  Description of Artificial Sequence:  Nucleic Acid
cccagcucggaggaaacucccuucaaggacaucguccgggccccuuuc

SEQ ID NO: 3490 - RNA, 48 nt, Artificial Sequence
  Description of Artificial Sequence:  Nucleic Acid
ccccagcuggaggaaacucccuucaaggacaucguccgggcccccuuu

SEQ ID NO: 3491 - RNA, 48 nt, Artificial Sequence
  Description of Artificial Sequence:  Nucleic Acid
uuccccagggaggaaacucccuucaaggacaucguccggguccccccu

SEQ ID NO: 3492 - RNA, 48 nt, Artificial Sequence
  Description of Artificial Sequence:  Nucleic Acid
aguuucccggaggaaacucccuucaaggacaucguccgggagcucccc

SEQ ID NO: 3493 - RNA, 48 nt, Artificial Sequence
  Description of Artificial Sequence:  Nucleic Acid
gaguuuccggaggaaacucccuucaaggacaucguccgggcagcuccc

SEQ ID NO: 3494 - RNA, 48 nt, Artificial Sequence
  Description of Artificial Sequence:  Nucleic Acid
ugaguuucggaggaaacucccuucaaggacaucguccgggccagcucc

SEQ ID NO: 3495 - RNA, 48 nt, Artificial Sequence
  Description of Artificial Sequence:  Nucleic Acid
uugaguuuggaggaaacucccuucaaggacaucguccgggcccagcuc

SEQ ID NO: 3496 - RNA, 48 nt, Artificial Sequence
  Description of Artificial Sequence:  Nucleic Acid
caucaggaggaggaaacucccuucaaggacaucguccgggaggggaaa

SEQ ID NO: 3497 - RNA, 48 nt, Artificial Sequence
  Description of Artificial Sequence:  Nucleic Acid
cugaccauggaggaaacucccuucaaggacaucguccgggaggacagg

SEQ ID NO: 3498 - RNA, 48 nt, Artificial Sequence
  Description of Artificial Sequence:  Nucleic Acid
gagcugacggaggaaacucccuucaaggacaucguccgggaucaggac

SEQ ID NO: 3499 - RNA, 48 nt, Artificial Sequence
  Description of Artificial Sequence:  Nucleic Acid
ggagcugaggaggaaacucccuucaaggacaucguccgggcaucagga

SEQ ID NO: 3500 - RNA, 48 nt, Artificial Sequence
  Description of Artificial Sequence:  Nucleic Acid
gaagggagggaggaaacucccuucaaggacaucguccgggugaccauc

SEQ ID NO: 3501 - RNA, 48 nt, Artificial Sequence
  Description of Artificial Sequence:  Nucleic Acid
guucccuaggaggaaacucccuucaaggacaucguccgggagagaagg

SEQ ID NO: 3502 - RNA, 48 nt, Artificial Sequence
  Description of Artificial Sequence:  Nucleic Acid
acaguuccggaggaaacucccuucaaggacaucguccggguacagaga

SEQ ID NO: 3503 - RNA, 48 nt, Artificial Sequence
  Description of Artificial Sequence:  Nucleic Acid
cacaguucggaggaaacucccuucaaggacaucguccgggcuacagag

SEQ ID NO: 3504 - RNA, 48 nt, Artificial Sequence
  Description of Artificial Sequence:  Nucleic Acid
ccacaguuggaggaaacucccuucaaggacaucguccgggccuacaga

SEQ ID NO: 3505 - RNA, 48 nt, Artificial Sequence
  Description of Artificial Sequence:  Nucleic Acid
ggaccccaggaggaaacucccuucaaggacaucguccgggaguucccu

SEQ ID NO: 3506 - RNA, 48 nt, Artificial Sequence
  Description of Artificial Sequence:  Nucleic Acid
ggggacccggaggaaacucccuucaaggacaucguccgggacaguucc

SEQ ID NO: 3507 - RNA, 48 nt, Artificial Sequence
  Description of Artificial Sequence:  Nucleic Acid
gggggaccggaggaaacucccuucaaggacaucguccgggcacaguuc

SEQ ID NO: 3508 - RNA, 48 nt, Artificial Sequence
  Description of Artificial Sequence:  Nucleic Acid
ugggggacggaggaaacucccuucaaggacaucguccgggccacaguu

SEQ ID NO: 3509 - RNA, 48 nt, Artificial Sequence
  Description of Artificial Sequence:  Nucleic Acid
augggggaggaggaaacucccuucaaggacaucguccgggcccacagu

SEQ ID NO: 3510 - RNA, 48 nt, Artificial Sequence
  Description of Artificial Sequence:  Nucleic Acid
accagaagggaggaaacucccuucaaggacaucguccggguggaggau

SEQ ID NO: 3511 - RNA, 48 nt, Artificial Sequence
  Description of Artificial Sequence:  Nucleic Acid
gagaguacggaggaaacucccuucaaggacaucguccgggagaagcug

SEQ ID NO: 3512 - RNA, 48 nt, Artificial Sequence
  Description of Artificial Sequence:  Nucleic Acid
ggagaguaggaggaaacucccuucaaggacaucguccgggcagaagcu

SEQ ID NO: 3513 - RNA, 48 nt, Artificial Sequence
  Description of Artificial Sequence:  Nucleic Acid
uucugucuggaggaaacucccuucaaggacaucguccggguaggagag

SEQ ID NO: 3514 - RNA, 48 nt, Artificial Sequence
  Description of Artificial Sequence:  Nucleic Acid
gcuucuguggaggaaacucccuucaaggacaucguccgggucuaggag

SEQ ID NO: 3515 - RNA, 48 nt, Artificial Sequence
  Description of Artificial Sequence:  Nucleic Acid
gccugcuuggaggaaacucccuucaaggacaucguccgggugucucua

SEQ ID NO: 3516 - RNA, 48 nt, Artificial Sequence
  Description of Artificial Sequence:  Nucleic Acid
ccagccugggaggaaacucccuucaaggacaucguccggguucugucu

SEQ ID NO: 3517 - RNA, 48 nt, Artificial Sequence
  Description of Artificial Sequence:  Nucleic Acid
ccuccagcggaggaaacucccuucaaggacaucguccgggugcuucug

SEQ ID NO: 3518 - RNA, 48 nt, Artificial Sequence
  Description of Artificial Sequence:  Nucleic Acid
accuccagggaggaaacucccuucaaggacaucguccgggcugcuucu

SEQ ID NO: 3519 - RNA, 48 nt, Artificial Sequence
  Description of Artificial Sequence:  Nucleic Acid
cuuaccucggaggaaacucccuucaaggacaucguccgggagccugcu

SEQ ID NO: 3520 - RNA, 48 nt, Artificial Sequence
  Description of Artificial Sequence:  Nucleic Acid
ccuuaccuggaggaaacucccuucaaggacaucguccgggcagccugc

SEQ ID NO: 3521 - RNA, 48 nt, Artificial Sequence
  Description of Artificial Sequence:  Nucleic Acid
ggccuuacggaggaaacucccuucaaggacaucguccggguccagccu

SEQ ID NO: 3522 - RNA, 48 nt, Artificial Sequence
  Description of Artificial Sequence:  Nucleic Acid
aggccuuaggaggaaacucccuucaaggacaucguccgggcuccagcc

SEQ ID NO: 3523 - RNA, 48 nt, Artificial Sequence
  Description of Artificial Sequence:  Nucleic Acid
ucaaaggcggaggaaacucccuucaaggacaucguccggguuaccucc

SEQ ID NO: 3524 - RNA, 48 nt, Artificial Sequence
  Description of Artificial Sequence:  Nucleic Acid
cucaaaggggaggaaacucccuucaaggacaucguccgggcuuaccuc

SEQ ID NO: 3525 - RNA, 48 nt, Artificial Sequence
  Description of Artificial Sequence:  Nucleic Acid
ugugggcuggaggaaacucccuucaaggacaucguccgggaaaggccu

SEQ ID NO: 3526 - RNA, 48 nt, Artificial Sequence
  Description of Artificial Sequence:  Nucleic Acid
uuugugggggaggaaacucccuucaaggacaucguccgggucaaaggc

SEQ ID NO: 3527 - RNA, 48 nt, Artificial Sequence
  Description of Artificial Sequence:  Nucleic Acid
ugauaaggggaggaaacucccuucaaggacaucguccggguuuguggg

SEQ ID NO: 3528 - RNA, 48 nt, Artificial Sequence
  Description of Artificial Sequence:  Nucleic Acid
ggaagacaggaggaaacucccuucaaggacaucguccggguugauaag

SEQ ID NO: 3529 - RNA, 48 nt, Artificial Sequence
  Description of Artificial Sequence:  Nucleic Acid
auggaagaggaggaaacucccuucaaggacaucguccgggacuugaua

SEQ ID NO: 3530 - RNA, 48 nt, Artificial Sequence
  Description of Artificial Sequence:  Nucleic Acid
aaugaaucggaggaaacucccuucaaggacaucguccgggaugaugga

SEQ ID NO: 3531 - RNA, 48 nt, Artificial Sequence
  Description of Artificial Sequence:  Nucleic Acid
uaaugaauggaggaaacucccuucaaggacaucguccgggcaugaugg

SEQ ID NO: 3532 - RNA, 48 nt, Artificial Sequence
  Description of Artificial Sequence:  Nucleic Acid
ugauuaagggaggaaacucccuucaaggacaucguccggguguaauga

SEQ ID NO: 3533 - RNA, 48 nt, Artificial Sequence
  Description of Artificial Sequence:  Nucleic Acid
aucuggggggaggaaacucccuucaaggacaucguccgggguuauuuu

SEQ ID NO: 3534 - RNA, 48 nt, Artificial Sequence
  Description of Artificial Sequence:  Nucleic Acid
gcugguauggaggaaacucccuucaaggacaucguccggguggggcgu

SEQ ID NO: 3535 - RNA, 48 nt, Artificial Sequence
  Description of Artificial Sequence:  Nucleic Acid
uacaggggggaggaaacucccuucaaggacaucguccgggugguaucu

SEQ ID NO: 3536 - RNA, 48 nt, Artificial Sequence
  Description of Artificial Sequence:  Nucleic Acid
gugccauaggaggaaacucccuucaaggacaucguccgggaggggcug

SEQ ID NO: 3537 - RNA, 48 nt, Artificial Sequence
  Description of Artificial Sequence:  Nucleic Acid
gccagugcggaggaaacucccuucaaggacaucguccgggauacaggg

SEQ ID NO: 3538 - RNA, 48 nt, Artificial Sequence
  Description of Artificial Sequence:  Nucleic Acid
ugccagugggaggaaacucccuucaaggacaucguccgggcauacagg

SEQ ID NO: 3539 - RNA, 48 nt, Artificial Sequence
  Description of Artificial Sequence:  Nucleic Acid
gacaaugcggaggaaacucccuucaaggacaucguccgggagugccau

SEQ ID NO: 3540 - RNA, 48 nt, Artificial Sequence
  Description of Artificial Sequence:  Nucleic Acid
ggacaaugggaggaaacucccuucaaggacaucguccgggcagugcca

SEQ ID NO: 3541 - RNA, 48 nt, Artificial Sequence
  Description of Artificial Sequence:  Nucleic Acid
cacagggaggaggaaacucccuucaaggacaucguccgggaaugccag

SEQ ID NO: 3542 - RNA, 48 nt, Artificial Sequence
  Description of Artificial Sequence:  Nucleic Acid
guuaggcaggaggaaacucccuucaaggacaucguccgggagggacaa

SEQ ID NO: 3543 - RNA, 48 nt, Artificial Sequence
  Description of Artificial Sequence:  Nucleic Acid
guguuaggggaggaaacucccuucaaggacaucguccgggacagggac

SEQ ID NO: 3544 - RNA, 48 nt, Artificial Sequence
  Description of Artificial Sequence:  Nucleic Acid
cucaaacgggaggaaacucccuucaaggacaucguccgggugguguua

SEQ ID NO: 3545 - RNA, 48 nt, Artificial Sequence
  Description of Artificial Sequence:  Nucleic Acid
cccucaaaggaggaaacucccuucaaggacaucguccggggcuggugu

SEQ ID NO: 3546 - RNA, 48 nt, Artificial Sequence
  Description of Artificial Sequence:  Nucleic Acid
cagccccuggaggaaacucccuucaaggacaucguccgggaaacgcug

SEQ ID NO: 3547 - RNA, 48 nt, Artificial Sequence
  Description of Artificial Sequence:  Nucleic Acid
ggcagcccggaggaaacucccuucaaggacaucguccgggucaaacgc

SEQ ID NO: 3548 - RNA, 48 nt, Artificial Sequence
  Description of Artificial Sequence:  Nucleic Acid
aggcagccggaggaaacucccuucaaggacaucguccgggcucaaacg

SEQ ID NO: 3549 - RNA, 48 nt, Artificial Sequence
  Description of Artificial Sequence:  Nucleic Acid
aaggcagcggaggaaacucccuucaaggacaucguccgggccucaaac

SEQ ID NO: 3550 - RNA, 48 nt, Artificial Sequence
  Description of Artificial Sequence:  Nucleic Acid
gaaggcagggaggaaacucccuucaaggacaucguccgggcccucaaa

SEQ ID NO: 3551 - RNA, 48 nt, Artificial Sequence
  Description of Artificial Sequence:  Nucleic Acid
caggaaggggaggaaacucccuucaaggacaucguccgggagccccuc

SEQ ID NO: 3552 - RNA, 48 nt, Artificial Sequence
  Description of Artificial Sequence:  Nucleic Acid
cuguagggggaggaaacucccuucaaggacaucguccgggaggaaggc

SEQ ID NO: 3553 - RNA, 48 nt, Artificial Sequence
  Description of Artificial Sequence:  Nucleic Acid
agagaccuggaggaaacucccuucaaggacaucguccggguguagggc

SEQ ID NO: 3554 - RNA, 48 nt, Artificial Sequence
  Description of Artificial Sequence:  Nucleic Acid
gcagagacggaggaaacucccuucaaggacaucguccgggucuguagg

SEQ ID NO: 3555 - RNA, 48 nt, Artificial Sequence
  Description of Artificial Sequence:  Nucleic Acid
ggcagagaggaggaaacucccuucaaggacaucguccgggcucuguag

SEQ ID NO: 3556 - RNA, 48 nt, Artificial Sequence
  Description of Artificial Sequence:  Nucleic Acid
agagccggggaggaaacucccuucaaggacaucguccgggagagaccu

SEQ ID NO: 3557 - RNA, 48 nt, Artificial Sequence
  Description of Artificial Sequence:  Nucleic Acid
gaaagagcggaggaaacucccuucaaggacaucguccgggggcagaga

SEQ ID NO: 3558 - RNA, 48 nt, Artificial Sequence
  Description of Artificial Sequence:  Nucleic Acid
ggaaagagggaggaaacucccuucaaggacaucguccgggcggcagag

SEQ ID NO: 3559 - RNA, 48 nt, Artificial Sequence
  Description of Artificial Sequence:  Nucleic Acid
ugguugagggaggaaacucccuucaaggacaucguccgggaaggaaag

SEQ ID NO: 3560 - RNA, 48 nt, Artificial Sequence
  Description of Artificial Sequence:  Nucleic Acid
ccuucagcggaggaaacucccuucaaggacaucguccgggaugguuga

SEQ ID NO: 3561 - RNA, 48 nt, Artificial Sequence
  Description of Artificial Sequence:  Nucleic Acid
uccuucagggaggaaacucccuucaaggacaucguccgggcaugguug

SEQ ID NO: 3562 - RNA, 48 nt, Artificial Sequence
  Description of Artificial Sequence:  Nucleic Acid
guuuccuuggaggaaacucccuucaaggacaucguccgggagccaugg

SEQ ID NO: 3563 - RNA, 48 nt, Artificial Sequence
  Description of Artificial Sequence:  Nucleic Acid
acuguuucggaggaaacucccuucaaggacaucguccggguucagcca

SEQ ID NO: 3564 - RNA, 48 nt, Artificial Sequence
  Description of Artificial Sequence:  Nucleic Acid
cacuguuuggaggaaacucccuucaaggacaucguccgggcuucagcc

SEQ ID NO: 3565 - RNA, 48 nt, Artificial Sequence
  Description of Artificial Sequence:  Nucleic Acid
cuguugcaggaggaaacucccuucaaggacaucguccggguguuuccu

SEQ ID NO: 3566 - RNA, 48 nt, Artificial Sequence
  Description of Artificial Sequence:  Nucleic Acid
ugcuguugggaggaaacucccuucaaggacaucguccgggacuguuuc

SEQ ID NO: 3567 - RNA, 48 nt, Artificial Sequence
  Description of Artificial Sequence:  Nucleic Acid
agccagugggaggaaacucccuucaaggacaucguccggguguugcac

SEQ ID NO: 3568 - RNA, 48 nt, Artificial Sequence
  Description of Artificial Sequence:  Nucleic Acid
gagagagcggaggaaacucccuucaaggacaucguccgggagugcugu

SEQ ID NO: 3569 - RNA, 48 nt, Artificial Sequence
  Description of Artificial Sequence:  Nucleic Acid
ggagagagggaggaaacucccuucaaggacaucguccgggcagugcug

SEQ ID NO: 3570 - RNA, 48 nt, Artificial Sequence
  Description of Artificial Sequence:  Nucleic Acid
ucuggaucggaggaaacucccuucaaggacaucguccggguggagaga

SEQ ID NO: 3571 - RNA, 48 nt, Artificial Sequence
  Description of Artificial Sequence:  Nucleic Acid
uucuggauggaggaaacucccuucaaggacaucguccgggcuggagag

SEQ ID NO: 3572 - RNA, 48 nt, Artificial Sequence
  Description of Artificial Sequence:  Nucleic Acid
aaccccuuggaggaaacucccuucaaggacaucguccggguggauccu

SEQ ID NO: 3573 - RNA, 48 nt, Artificial Sequence
  Description of Artificial Sequence:  Nucleic Acid
ccaaacccggaggaaacucccuucaaggacaucguccggguucuggau

SEQ ID NO: 3574 - RNA, 48 nt, Artificial Sequence
  Description of Artificial Sequence:  Nucleic Acid
accaaaccggaggaaacucccuucaaggacaucguccgggcuucugga

SEQ ID NO: 3575 - RNA, 48 nt, Artificial Sequence
  Description of Artificial Sequence:  Nucleic Acid
gaccaaacggaggaaacucccuucaaggacaucguccgggccuucugg

SEQ ID NO: 3576 - RNA, 48 nt, Artificial Sequence
  Description of Artificial Sequence:  Nucleic Acid
agaccaaaggaggaaacucccuucaaggacaucguccgggcccuucug

SEQ ID NO: 3577 - RNA, 48 nt, Artificial Sequence
  Description of Artificial Sequence:  Nucleic Acid
guccagacggaggaaacucccuucaaggacaucguccgggaaaccccu

SEQ ID NO: 3578 - RNA, 48 nt, Artificial Sequence
  Description of Artificial Sequence:  Nucleic Acid
aguccagaggaggaaacucccuucaaggacaucguccgggcaaacccc

SEQ ID NO: 3579 - RNA, 48 nt, Artificial Sequence
  Description of Artificial Sequence:  Nucleic Acid
aggaagucggaggaaacucccuucaaggacaucguccgggagaccaaa

SEQ ID NO: 3580 - RNA, 48 nt, Artificial Sequence
  Description of Artificial Sequence:  Nucleic Acid
aaggaaguggaggaaacucccuucaaggacaucguccgggcagaccaa

SEQ ID NO: 3581 - RNA, 48 nt, Artificial Sequence
  Description of Artificial Sequence:  Nucleic Acid
ggggagagggaggaaacucccuucaaggacaucguccgggaaggaagu

SEQ ID NO: 3582 - RNA, 48 nt, Artificial Sequence
  Description of Artificial Sequence:  Nucleic Acid
uuaaggcaggaggaaacucccuucaaggacaucguccggguugagaag

SEQ ID NO: 3583 - RNA, 48 nt, Artificial Sequence
  Description of Artificial Sequence:  Nucleic Acid
uauuaaggggaggaaacucccuucaaggacaucguccgggacuugaga

SEQ ID NO: 3584 - RNA, 48 nt, Artificial Sequence
  Description of Artificial Sequence:  Nucleic Acid
uuacccuaggaggaaacucccuucaaggacaucguccggguauuaagg

SEQ ID NO: 3585 - RNA, 48 nt, Artificial Sequence
  Description of Artificial Sequence:  Nucleic Acid
aacuuaccggaggaaacucccuucaaggacaucguccggguacuauua

SEQ ID NO: 3586 - RNA, 48 nt, Artificial Sequence
  Description of Artificial Sequence:  Nucleic Acid
caacuuacggaggaaacucccuucaaggacaucguccgggcuacuauu

SEQ ID NO: 3587 - RNA, 48 nt, Artificial Sequence
  Description of Artificial Sequence:  Nucleic Acid
acaacuuaggaggaaacucccuucaaggacaucguccgggccuacuau

SEQ ID NO: 3588 - RNA, 48 nt, Artificial Sequence
  Description of Artificial Sequence:  Nucleic Acid
cuuaacaaggaggaaacucccuucaaggacaucguccggguuacccua

SEQ ID NO: 3589 - RNA, 48 nt, Artificial Sequence
  Description of Artificial Sequence:  Nucleic Acid
acucuuaaggaggaaacucccuucaaggacaucguccgggaacuuacc

SEQ ID NO: 3590 - RNA, 48 nt, Artificial Sequence
  Description of Artificial Sequence:  Nucleic Acid
cccccacuggaggaaacucccuucaaggacaucguccggguuaacaac

SEQ ID NO: 3591 - RNA, 48 nt, Artificial Sequence
  Description of Artificial Sequence:  Nucleic Acid
cucccccaggaggaaacucccuucaaggacaucguccgggucuuaaca

SEQ ID NO: 3592 - RNA, 48 nt, Artificial Sequence
  Description of Artificial Sequence:  Nucleic Acid
cucuccccggaggaaacucccuucaaggacaucguccgggacucuuaa

SEQ ID NO: 3593 - RNA, 48 nt, Artificial Sequence
  Description of Artificial Sequence:  Nucleic Acid
gcucucccggaggaaacucccuucaaggacaucguccgggcacucuua

SEQ ID NO: 3594 - RNA, 48 nt, Artificial Sequence
  Description of Artificial Sequence:  Nucleic Acid
ugcucuccggaggaaacucccuucaaggacaucguccgggccacucuu

SEQ ID NO: 3595 - RNA, 48 nt, Artificial Sequence
  Description of Artificial Sequence:  Nucleic Acid
cugcucucggaggaaacucccuucaaggacaucguccgggcccacucu

SEQ ID NO: 3596 - RNA, 48 nt, Artificial Sequence
  Description of Artificial Sequence:  Nucleic Acid
ccugcucuggaggaaacucccuucaaggacaucguccgggccccacuc

SEQ ID NO: 3597 - RNA, 48 nt, Artificial Sequence
  Description of Artificial Sequence:  Nucleic Acid
agccugcuggaggaaacucccuucaaggacaucguccgggucccccac

SEQ ID NO: 3598 - RNA, 48 nt, Artificial Sequence
  Description of Artificial Sequence:  Nucleic Acid
ccagccugggaggaaacucccuucaaggacaucguccgggucuccccc

SEQ ID NO: 3599 - RNA, 48 nt, Artificial Sequence
  Description of Artificial Sequence:  Nucleic Acid
cugccagcggaggaaacucccuucaaggacaucguccgggugcucucc

SEQ ID NO: 3600 - RNA, 48 nt, Artificial Sequence
  Description of Artificial Sequence:  Nucleic Acid
gcugccagggaggaaacucccuucaaggacaucguccgggcugcucuc

SEQ ID NO: 3601 - RNA, 48 nt, Artificial Sequence
  Description of Artificial Sequence:  Nucleic Acid
agagcugcggaggaaacucccuucaaggacaucguccgggagccugcu

SEQ ID NO: 3602 - RNA, 48 nt, Artificial Sequence
  Description of Artificial Sequence:  Nucleic Acid
gagagcugggaggaaacucccuucaaggacaucguccgggcagccugc

SEQ ID NO: 3603 - RNA, 48 nt, Artificial Sequence
  Description of Artificial Sequence:  Nucleic Acid
cuggagagggaggaaacucccuucaaggacaucguccgggugccagcc

SEQ ID NO: 3604 - RNA, 48 nt, Artificial Sequence
  Description of Artificial Sequence:  Nucleic Acid
ccuccugaggaggaaacucccuucaaggacaucguccggguggagagc

SEQ ID NO: 3605 - RNA, 48 nt, Artificial Sequence
  Description of Artificial Sequence:  Nucleic Acid
uaugccucggaggaaacucccuucaaggacaucguccgggugacugga

SEQ ID NO: 3606 - RNA, 48 nt, Artificial Sequence
  Description of Artificial Sequence:  Nucleic Acid
cuaugccuggaggaaacucccuucaaggacaucguccgggcugacugg

SEQ ID NO: 3607 - RNA, 48 nt, Artificial Sequence
  Description of Artificial Sequence:  Nucleic Acid
aacuaugcggaggaaacucccuucaaggacaucguccggguccugacu

SEQ ID NO: 3608 - RNA, 48 nt, Artificial Sequence
  Description of Artificial Sequence:  Nucleic Acid
aaacuaugggaggaaacucccuucaaggacaucguccgggcuccugac

SEQ ID NO: 3609 - RNA, 48 nt, Artificial Sequence
  Description of Artificial Sequence:  Nucleic Acid
acuaaaaaggaggaaacucccuucaaggacaucguccggguaugccuc

SEQ ID NO: 3610 - RNA, 48 nt, Artificial Sequence
  Description of Artificial Sequence:  Nucleic Acid
auuguucaggaggaaacucccuucaaggacaucguccggguaaaaacu

SEQ ID NO: 3611 - RNA, 48 nt, Artificial Sequence
  Description of Artificial Sequence:  Nucleic Acid
ugauuguuggaggaaacucccuucaaggacaucguccgggacuaaaaa

SEQ ID NO: 3612 - RNA, 48 nt, Artificial Sequence
  Description of Artificial Sequence:  Nucleic Acid
uccaagugggaggaaacucccuucaaggacaucguccggguuugauug

SEQ ID NO: 3613 - RNA, 48 nt, Artificial Sequence
  Description of Artificial Sequence:  Nucleic Acid
caagagucggaggaaacucccuucaaggacaucguccgggaagugcuu

SEQ ID NO: 3614 - RNA, 48 nt, Artificial Sequence
  Description of Artificial Sequence:  Nucleic Acid
gcaagaguggaggaaacucccuucaaggacaucguccgggcaagugcu

SEQ ID NO: 3615 - RNA, 48 nt, Artificial Sequence
  Description of Artificial Sequence:  Nucleic Acid
agaaagagggaggaaacucccuucaaggacaucguccgggaagagucc

SEQ ID NO: 3616 - RNA, 48 nt, Artificial Sequence
  Description of Artificial Sequence:  Nucleic Acid
uauuaguuggaggaaacucccuucaaggacaucguccgggagaguaga

SEQ ID NO: 3617 - RNA, 48 nt, Artificial Sequence
  Description of Artificial Sequence:  Nucleic Acid
ggcaacagggaggaaacucccuucaaggacaucguccggguuuauuag

SEQ ID NO: 3618 - RNA, 48 nt, Artificial Sequence
  Description of Artificial Sequence:  Nucleic Acid
cuuggcaaggaggaaacucccuucaaggacaucguccgggagcuuuau

SEQ ID NO: 3619 - RNA, 48 nt, Artificial Sequence
  Description of Artificial Sequence:  Nucleic Acid
cagcuuggggaggaaacucccuucaaggacaucguccgggaacagcuu

SEQ ID NO: 3620 - RNA, 48 nt, Artificial Sequence
  Description of Artificial Sequence:  Nucleic Acid
ccguccagggaggaaacucccuucaaggacaucguccggguuggcaac

SEQ ID NO: 3621 - RNA, 48 nt, Artificial Sequence
  Description of Artificial Sequence:  Nucleic Acid
gugccgucggaggaaacucccuucaaggacaucguccgggagcuuggc

SEQ ID NO: 3622 - RNA, 48 nt, Artificial Sequence
  Description of Artificial Sequence:  Nucleic Acid
cgugccguggaggaaacucccuucaaggacaucguccgggcagcuugg

SEQ ID NO: 3623 - RNA, 48 nt, Artificial Sequence
  Description of Artificial Sequence:  Nucleic Acid
gcucgugcggaggaaacucccuucaaggacaucguccgggguccagcu

SEQ ID NO: 3624 - RNA, 48 nt, Artificial Sequence
  Description of Artificial Sequence:  Nucleic Acid
agcucgugggaggaaacucccuucaaggacaucguccgggcguccagc

SEQ ID NO: 3625 - RNA, 48 nt, Artificial Sequence
  Description of Artificial Sequence:  Nucleic Acid
cacgagcuggaggaaacucccuucaaggacaucguccggggugccguc

SEQ ID NO: 3626 - RNA, 48 nt, Artificial Sequence
  Description of Artificial Sequence:  Nucleic Acid
ggcacgagggaggaaacucccuucaaggacaucguccgggucgugccg

SEQ ID NO: 3627 - RNA, 15 nt, Artificial Sequence
  Description of Artificial Sequence:  Nucleic Acid
ccaccaucaagauca

SEQ ID NO: 3628 - RNA, 13 nt, Artificial Sequence
  Description of Artificial Sequence:  Nucleic Acid
gcaucucccuggu

SEQ ID NO: 3629 - RNA, 13 nt, Artificial Sequence
  Description of Artificial Sequence:  Nucleic Acid
ccaaguuccuaua

SEQ ID NO: 3630 - RNA, 13 nt, Artificial Sequence
  Description of Artificial Sequence:  Nucleic Acid
cgagcucaagauc

SEQ ID NO: 3631 - RNA, 13 nt, Artificial Sequence
  Description of Artificial Sequence:  Nucleic Acid
agguguauuucac

SEQ ID NO: 3632 - RNA, 11 nt, Artificial Sequence
  Description of Artificial Sequence:  Nucleic Acid
cgugucuccau

SEQ ID NO: 3633 - RNA, 13 nt, Artificial Sequence
  Description of Artificial Sequence:  Nucleic Acid
aagaguccuuuca

SEQ ID NO: 3634 - RNA, 11 nt, Artificial Sequence
  Description of Artificial Sequence:  Nucleic Acid
gcuauaacucg

SEQ ID NO: 3635 - RNA, 13 nt, Artificial Sequence
  Description of Artificial Sequence:  Nucleic Acid
acuucuccuccau

SEQ ID NO: 3636 - RNA, 15 nt, Artificial Sequence
  Description of Artificial Sequence:  Nucleic Acid
gucagaucagcuccu

SEQ ID NO: 3637 - RNA, 14 nt, Artificial Sequence
  Description of Artificial Sequence:  Nucleic Acid
ccacaguuuccaga

SEQ ID NO: 3638 - RNA, 13 nt, Artificial Sequence
  Description of Artificial Sequence:  Nucleic Acid
acagauaccacca

SEQ ID NO: 3639 - RNA, 15 nt, Artificial Sequence
  Description of Artificial Sequence:  Nucleic Acid
cacagauaccaccaa

SEQ ID NO: 3640 - RNA, 13 nt, Artificial Sequence
  Description of Artificial Sequence:  Nucleic Acid
auggcuacacagg

SEQ ID NO: 3641 - RNA, 15 nt, Artificial Sequence
  Description of Artificial Sequence:  Nucleic Acid
ccgagcucaagaucu

SEQ ID NO: 3642 - RNA, 13 nt, Artificial Sequence
  Description of Artificial Sequence:  Nucleic Acid
uguauuucacggg

SEQ ID NO: 3643 - RNA, 15 nt, Artificial Sequence
  Description of Artificial Sequence:  Nucleic Acid
guguauuucacggga

SEQ ID NO: 3644 - RNA, 15 nt, Artificial Sequence
  Description of Artificial Sequence:  Nucleic Acid
uguauuucacgggac

SEQ ID NO: 3645 - RNA, 13 nt, Artificial Sequence
  Description of Artificial Sequence:  Nucleic Acid
gaggcuccuuuuc

SEQ ID NO: 3646 - RNA, 13 nt, Artificial Sequence
  Description of Artificial Sequence:  Nucleic Acid
uuguguuccggac

SEQ ID NO: 3647 - RNA, 13 nt, Artificial Sequence
  Description of Artificial Sequence:  Nucleic Acid
agaccuucaagag

SEQ ID NO: 3648 - RNA, 13 nt, Artificial Sequence
  Description of Artificial Sequence:  Nucleic Acid
uucuguccccaag

SEQ ID NO: 3649 - RNA, 15 nt, Artificial Sequence
  Description of Artificial Sequence:  Nucleic Acid
cuucuguccccaagc

SEQ ID NO: 3650 - RNA, 13 nt, Artificial Sequence
  Description of Artificial Sequence:  Nucleic Acid
uggaguacccuga

SEQ ID NO: 3651 - RNA, 15 nt, Artificial Sequence
  Description of Artificial Sequence:  Nucleic Acid
gacuucuccuccauu

SEQ ID NO: 3652 - RNA, 15 nt, Artificial Sequence
  Description of Artificial Sequence:  Nucleic Acid
uucuccuccauugcg

SEQ ID NO: 3653 - RNA, 13 nt, Artificial Sequence
  Description of Artificial Sequence:  Nucleic Acid
uggacucuugcuc

SEQ ID NO: 3654 - RNA, 15 nt, Artificial Sequence
  Description of Artificial Sequence:  Nucleic Acid
uuggacucuugcucu

SEQ ID NO: 3655 - RNA, 13 nt, Artificial Sequence
  Description of Artificial Sequence:  Nucleic Acid
gacucuugcucuu

SEQ ID NO: 3656 - RNA, 15 nt, Artificial Sequence
  Description of Artificial Sequence:  Nucleic Acid
ggacucuugcucuuu

SEQ ID NO: 3657 - RNA, 13 nt, Artificial Sequence
  Description of Artificial Sequence:  Nucleic Acid
cuugcucuuucua

SEQ ID NO: 3658 - RNA, 13 nt, Artificial Sequence
  Description of Artificial Sequence:  Nucleic Acid
acgacucguucga

SEQ ID NO: 3659 - RNA, 15 nt, Artificial Sequence
  Description of Artificial Sequence:  Nucleic Acid
agccuguauaccgcg

SEQ ID NO: 3660 - RNA, 13 nt, Artificial Sequence
  Description of Artificial Sequence:  Nucleic Acid
gauaccaccaaga

SEQ ID NO: 3661 - RNA, 15 nt, Artificial Sequence
  Description of Artificial Sequence:  Nucleic Acid
agauaccaccaagac

SEQ ID NO: 3662 - RNA, 13 nt, Artificial Sequence
  Description of Artificial Sequence:  Nucleic Acid
cccaccaucaaga

SEQ ID NO: 3663 - RNA, 13 nt, Artificial Sequence
  Description of Artificial Sequence:  Nucleic Acid
accaucaagauca

SEQ ID NO: 3664 - RNA, 15 nt, Artificial Sequence
  Description of Artificial Sequence:  Nucleic Acid
caccaucaagaucaa

SEQ ID NO: 3665 - RNA, 13 nt, Artificial Sequence
  Description of Artificial Sequence:  Nucleic Acid
aagaucaauggcu

SEQ ID NO: 3666 - RNA, 15 nt, Artificial Sequence
  Description of Artificial Sequence:  Nucleic Acid
caagaucaauggcua

SEQ ID NO: 3667 - RNA, 13 nt, Artificial Sequence
  Description of Artificial Sequence:  Nucleic Acid
aauggcuacacag

SEQ ID NO: 3668 - RNA, 15 nt, Artificial Sequence
  Description of Artificial Sequence:  Nucleic Acid
caauggcuacacagg

SEQ ID NO: 3669 - RNA, 13 nt, Artificial Sequence
  Description of Artificial Sequence:  Nucleic Acid
gacugccgggaug

SEQ ID NO: 3670 - RNA, 13 nt, Artificial Sequence
  Description of Artificial Sequence:  Nucleic Acid
cucugcuuccagg

SEQ ID NO: 3671 - RNA, 13 nt, Artificial Sequence
  Description of Artificial Sequence:  Nucleic Acid
ggugacagugcgg

SEQ ID NO: 3672 - RNA, 15 nt, Artificial Sequence
  Description of Artificial Sequence:  Nucleic Acid
aggugacagugcggg

SEQ ID NO: 3673 - RNA, 13 nt, Artificial Sequence
  Description of Artificial Sequence:  Nucleic Acid
cacugccgagcuc

SEQ ID NO: 3674 - RNA, 15 nt, Artificial Sequence
  Description of Artificial Sequence:  Nucleic Acid
acacugccgagcuca

SEQ ID NO: 3675 - RNA, 13 nt, Artificial Sequence
  Description of Artificial Sequence:  Nucleic Acid
ccgagcucaagau

SEQ ID NO: 3676 - RNA, 13 nt, Artificial Sequence
  Description of Artificial Sequence:  Nucleic Acid
gagcucaagaucu

SEQ ID NO: 3677 - RNA, 13 nt, Artificial Sequence
  Description of Artificial Sequence:  Nucleic Acid
aggugcagaaaga

SEQ ID NO: 3678 - RNA, 15 nt, Artificial Sequence
  Description of Artificial Sequence:  Nucleic Acid
guauuucacgggacc

SEQ ID NO: 3679 - RNA, 13 nt, Artificial Sequence
  Description of Artificial Sequence:  Nucleic Acid
gggaccaggcugg

SEQ ID NO: 3680 - RNA, 13 nt, Artificial Sequence
  Description of Artificial Sequence:  Nucleic Acid
aguggccauugug

SEQ ID NO: 3681 - RNA, 15 nt, Artificial Sequence
  Description of Artificial Sequence:  Nucleic Acid
aaguggccauugugu

SEQ ID NO: 3682 - RNA, 13 nt, Artificial Sequence
  Description of Artificial Sequence:  Nucleic Acid
guggccauugugu

SEQ ID NO: 3683 - RNA, 15 nt, Artificial Sequence
  Description of Artificial Sequence:  Nucleic Acid
aguggccauuguguu

SEQ ID NO: 3684 - RNA, 13 nt, Artificial Sequence
  Description of Artificial Sequence:  Nucleic Acid
gucuccaugcagc

SEQ ID NO: 3685 - RNA, 13 nt, Artificial Sequence
  Description of Artificial Sequence:  Nucleic Acid
gugagcccaugga

SEQ ID NO: 3686 - RNA, 13 nt, Artificial Sequence
  Description of Artificial Sequence:  Nucleic Acid
caguaccugccag

SEQ ID NO: 3687 - RNA, 15 nt, Artificial Sequence
  Description of Artificial Sequence:  Nucleic Acid
ccaguaccugccaga

SEQ ID NO: 3688 - RNA, 13 nt, Artificial Sequence
  Description of Artificial Sequence:  Nucleic Acid
aaggacauaugag

SEQ ID NO: 3689 - RNA, 15 nt, Artificial Sequence
  Description of Artificial Sequence:  Nucleic Acid
aaaggacauaugaga

SEQ ID NO: 3690 - RNA, 13 nt, Artificial Sequence
  Description of Artificial Sequence:  Nucleic Acid
ucuguccccaagc

SEQ ID NO: 3691 - RNA, 13 nt, Artificial Sequence
  Description of Artificial Sequence:  Nucleic Acid
cuguccccaagcc

SEQ ID NO: 3692 - RNA, 15 nt, Artificial Sequence
  Description of Artificial Sequence:  Nucleic Acid
ucuguccccaagcca

SEQ ID NO: 3693 - RNA, 13 nt, Artificial Sequence
  Description of Artificial Sequence:  Nucleic Acid
agcaccaucaacu

SEQ ID NO: 3694 - RNA, 13 nt, Artificial Sequence
  Description of Artificial Sequence:  Nucleic Acid
gaagaccuggggg

SEQ ID NO: 3695 - RNA, 15 nt, Artificial Sequence
  Description of Artificial Sequence:  Nucleic Acid
ugaagaccugggggc

SEQ ID NO: 3696 - RNA, 13 nt, Artificial Sequence
  Description of Artificial Sequence:  Nucleic Acid
aacagcacagacc

SEQ ID NO: 3697 - RNA, 15 nt, Artificial Sequence
  Description of Artificial Sequence:  Nucleic Acid
caacagcacagaccc

SEQ ID NO: 3698 - RNA, 13 nt, Artificial Sequence
  Description of Artificial Sequence:  Nucleic Acid
cagcacagaccca

SEQ ID NO: 3699 - RNA, 15 nt, Artificial Sequence
  Description of Artificial Sequence:  Nucleic Acid
acagcacagacccag

SEQ ID NO: 3700 - RNA, 13 nt, Artificial Sequence
  Description of Artificial Sequence:  Nucleic Acid
guguucacagacc

SEQ ID NO: 3701 - RNA, 13 nt, Artificial Sequence
  Description of Artificial Sequence:  Nucleic Acid
guucacagaccug

SEQ ID NO: 3702 - RNA, 15 nt, Artificial Sequence
  Description of Artificial Sequence:  Nucleic Acid
uguucacagaccugg

SEQ ID NO: 3703 - RNA, 13 nt, Artificial Sequence
  Description of Artificial Sequence:  Nucleic Acid
acagaccuggcau

SEQ ID NO: 3704 - RNA, 15 nt, Artificial Sequence
  Description of Artificial Sequence:  Nucleic Acid
cacagaccuggcauc

SEQ ID NO: 3705 - RNA, 13 nt, Artificial Sequence
  Description of Artificial Sequence:  Nucleic Acid
cagaccuggcauc

SEQ ID NO: 3706 - RNA, 15 nt, Artificial Sequence
  Description of Artificial Sequence:  Nucleic Acid
acuucuccuccauug

SEQ ID NO: 3707 - RNA, 15 nt, Artificial Sequence
  Description of Artificial Sequence:  Nucleic Acid
cuucuccuccauugc

SEQ ID NO: 3708 - RNA, 15 nt, Artificial Sequence
  Description of Artificial Sequence:  Nucleic Acid
ucuccuccauugcgg

SEQ ID NO: 3709 - RNA, 13 nt, Artificial Sequence
  Description of Artificial Sequence:  Nucleic Acid
uccuccauugcgg

SEQ ID NO: 3710 - RNA, 13 nt, Artificial Sequence
  Description of Artificial Sequence:  Nucleic Acid
gcggacauggacu

SEQ ID NO: 3711 - RNA, 15 nt, Artificial Sequence
  Description of Artificial Sequence:  Nucleic Acid
ugcggacauggacuu

SEQ ID NO: 3712 - RNA, 13 nt, Artificial Sequence
  Description of Artificial Sequence:  Nucleic Acid
cagaucagcuccu

SEQ ID NO: 3713 - RNA, 15 nt, Artificial Sequence
  Description of Artificial Sequence:  Nucleic Acid
ucagaucagcuccua

SEQ ID NO: 3714 - RNA, 13 nt, Artificial Sequence
  Description of Artificial Sequence:  Nucleic Acid
uuggacucuugcu

SEQ ID NO: 3715 - RNA, 13 nt, Artificial Sequence
  Description of Artificial Sequence:  Nucleic Acid
ggacucuugcucu

SEQ ID NO: 3716 - RNA, 15 nt, Artificial Sequence
  Description of Artificial Sequence:  Nucleic Acid
uggacucuugcucuu

SEQ ID NO: 3717 - RNA, 13 nt, Artificial Sequence
  Description of Artificial Sequence:  Nucleic Acid
ucuugcucuuucu

SEQ ID NO: 3718 - RNA, 15 nt, Artificial Sequence
  Description of Artificial Sequence:  Nucleic Acid
cucuugcucuuucua

SEQ ID NO: 3719 - RNA, 13 nt, Artificial Sequence
  Description of Artificial Sequence:  Nucleic Acid
cuaugcuacggca

SEQ ID NO: 3720 - RNA, 15 nt, Artificial Sequence
  Description of Artificial Sequence:  Nucleic Acid
augcucccgggucaa

SEQ ID NO: 3721 - RNA, 15 nt, Artificial Sequence
  Description of Artificial Sequence:  Nucleic Acid
aucaauggcuacaca

SEQ ID NO: 3722 - RNA, 13 nt, Artificial Sequence
  Description of Artificial Sequence:  Nucleic Acid
uccagugugugaa

SEQ ID NO: 3723 - RNA, 15 nt, Artificial Sequence
  Description of Artificial Sequence:  Nucleic Acid
auccagugugugaag

SEQ ID NO: 3724 - RNA, 15 nt, Artificial Sequence
  Description of Artificial Sequence:  Nucleic Acid
ccagugugugaagaa

SEQ ID NO: 3725 - RNA, 13 nt, Artificial Sequence
  Description of Artificial Sequence:  Nucleic Acid
uuccaggugacag

SEQ ID NO: 3726 - RNA, 15 nt, Artificial Sequence
  Description of Artificial Sequence:  Nucleic Acid
cuuccaggugacagu

SEQ ID NO: 3727 - RNA, 13 nt, Artificial Sequence
  Description of Artificial Sequence:  Nucleic Acid
gugacagugcggg

SEQ ID NO: 3728 - RNA, 15 nt, Artificial Sequence
  Description of Artificial Sequence:  Nucleic Acid
ggugacagugcggga

SEQ ID NO: 3729 - RNA, 13 nt, Artificial Sequence
  Description of Artificial Sequence:  Nucleic Acid
gacagugcgggac

SEQ ID NO: 3730 - RNA, 15 nt, Artificial Sequence
  Description of Artificial Sequence:  Nucleic Acid
ugacagugcgggacc

SEQ ID NO: 3731 - RNA, 13 nt, Artificial Sequence
  Description of Artificial Sequence:  Nucleic Acid
aacacugccgagc

SEQ ID NO: 3732 - RNA, 15 nt, Artificial Sequence
  Description of Artificial Sequence:  Nucleic Acid
caacacugccgagcu

SEQ ID NO: 3733 - RNA, 13 nt, Artificial Sequence
  Description of Artificial Sequence:  Nucleic Acid
ugccgagcucaag

SEQ ID NO: 3734 - RNA, 15 nt, Artificial Sequence
  Description of Artificial Sequence:  Nucleic Acid
cugccgagcucaaga

SEQ ID NO: 3735 - RNA, 13 nt, Artificial Sequence
  Description of Artificial Sequence:  Nucleic Acid
gacaaggugcaga

SEQ ID NO: 3736 - RNA, 15 nt, Artificial Sequence
  Description of Artificial Sequence:  Nucleic Acid
acaaggugcagaaag

SEQ ID NO: 3737 - RNA, 13 nt, Artificial Sequence
  Description of Artificial Sequence:  Nucleic Acid
ugagguguauuuc

SEQ ID NO: 3738 - RNA, 13 nt, Artificial Sequence
  Description of Artificial Sequence:  Nucleic Acid
gccauuguguucc

SEQ ID NO: 3739 - RNA, 15 nt, Artificial Sequence
  Description of Artificial Sequence:  Nucleic Acid
ggccauuguguuccg

SEQ ID NO: 3740 - RNA, 15 nt, Artificial Sequence
  Description of Artificial Sequence:  Nucleic Acid
ccauuguguuccgga

SEQ ID NO: 3741 - RNA, 13 nt, Artificial Sequence
  Description of Artificial Sequence:  Nucleic Acid
gcccaugcugaug

SEQ ID NO: 3742 - RNA, 15 nt, Artificial Sequence
  Description of Artificial Sequence:  Nucleic Acid
cagaucagcuccuaa

SEQ ID NO: 3743 - RNA, 13 nt, Artificial Sequence
  Description of Artificial Sequence:  Nucleic Acid
acucuugcucuuu

SEQ ID NO: 3744 - RNA, 15 nt, Artificial Sequence
  Description of Artificial Sequence:  Nucleic Acid
gacucuugcucuuuc

SEQ ID NO: 3745 - RNA, 13 nt, Artificial Sequence
  Description of Artificial Sequence:  Nucleic Acid
uccgacgcgaauu

SEQ ID NO: 3746 - RNA, 15 nt, Artificial Sequence
  Description of Artificial Sequence:  Nucleic Acid
acaugacguccgugc

SEQ ID NO: 3747 - RNA, 15 nt, Artificial Sequence
  Description of Artificial Sequence:  Nucleic Acid
acgagcuuguaggaa

SEQ ID NO: 3748 - RNA, 15 nt, Artificial Sequence
  Description of Artificial Sequence:  Nucleic Acid
cuguccuuucucauc

SEQ ID NO: 3749 - RNA, 15 nt, Artificial Sequence
  Description of Artificial Sequence:  Nucleic Acid
aggacauugaggugu

SEQ ID NO: 3750 - RNA, 15 nt, Artificial Sequence
  Description of Artificial Sequence:  Nucleic Acid
gaguccuuucagcgg

SEQ ID NO: 3751 - RNA, 15 nt, Artificial Sequence
  Description of Artificial Sequence:  Nucleic Acid
uugcucuuucuacuc

SEQ ID NO: 3752 - RNA, 15 nt, Artificial Sequence
  Description of Artificial Sequence:  Nucleic Acid
ccgcugcauccacag

SEQ ID NO: 3753 - RNA, 15 nt, Artificial Sequence
  Description of Artificial Sequence:  Nucleic Acid
ccuguccuuucucau

SEQ ID NO: 3754 - RNA, 15 nt, Artificial Sequence
  Description of Artificial Sequence:  Nucleic Acid
gucaucccugagcac

SEQ ID NO: 3755 - RNA, 15 nt, Artificial Sequence
  Description of Artificial Sequence:  Nucleic Acid
ucugggcagaucagc

SEQ ID NO: 3756 - RNA, 15 nt, Artificial Sequence
  Description of Artificial Sequence:  Nucleic Acid
ccugucccaguccua

SEQ ID NO: 3757 - RNA, 15 nt, Artificial Sequence
  Description of Artificial Sequence:  Nucleic Acid
gaccgcugcauccac

SEQ ID NO: 3758 - RNA, 15 nt, Artificial Sequence
  Description of Artificial Sequence:  Nucleic Acid
ugaagaagcgggacc

SEQ ID NO: 3759 - RNA, 15 nt, Artificial Sequence
  Description of Artificial Sequence:  Nucleic Acid
ccugugcgugucucc

SEQ ID NO: 3760 - RNA, 15 nt, Artificial Sequence
  Description of Artificial Sequence:  Nucleic Acid
ugugcgugucuccau

SEQ ID NO: 3761 - RNA, 15 nt, Artificial Sequence
  Description of Artificial Sequence:  Nucleic Acid
ugucccaguccuagc

SEQ ID NO: 3762 - RNA, 15 nt, Artificial Sequence
  Description of Artificial Sequence:  Nucleic Acid
agcacagauaccacc

SEQ ID NO: 3763 - RNA, 15 nt, Artificial Sequence
  Description of Artificial Sequence:  Nucleic Acid
aagaucaauggcuac

SEQ ID NO: 3764 - RNA, 15 nt, Artificial Sequence
  Description of Artificial Sequence:  Nucleic Acid
ucagcgcauccagac

SEQ ID NO: 3765 - RNA, 15 nt, Artificial Sequence
  Description of Artificial Sequence:  Nucleic Acid
gagcacagauaccac

SEQ ID NO: 3766 - RNA, 15 nt, Artificial Sequence
  Description of Artificial Sequence:  Nucleic Acid
ggauugaggagaaac

SEQ ID NO: 3767 - RNA, 15 nt, Artificial Sequence
  Description of Artificial Sequence:  Nucleic Acid
ugaugaugaagaccu

SEQ ID NO: 3768 - RNA, 15 nt, Artificial Sequence
  Description of Artificial Sequence:  Nucleic Acid
agagugggggagagc

SEQ ID NO: 3769 - RNA, 15 nt, Artificial Sequence
  Description of Artificial Sequence:  Nucleic Acid
ugggggagagcaggc

SEQ ID NO: 3770 - RNA, 36 nt, Artificial Sequence
  Description of Artificial Sequence:  Nucleic Acid
ugaucuucugaugaggccgaaaggccgaaauggugg

SEQ ID NO: 3771 - RNA, 34 nt, Artificial Sequence
  Description of Artificial Sequence:  Nucleic Acid
accaggcugaugaggccgaaaggccgaaagaugc

SEQ ID NO: 3772 - RNA, 34 nt, Artificial Sequence
  Description of Artificial Sequence:  Nucleic Acid
uauaggcugaugaggccgaaaggccgaaacuugg

SEQ ID NO: 3773 - RNA, 34 nt, Artificial Sequence
  Description of Artificial Sequence:  Nucleic Acid
gaucuucugaugaggccgaaaggccgaaagcucg

SEQ ID NO: 3774 - RNA, 34 nt, Artificial Sequence
  Description of Artificial Sequence:  Nucleic Acid
gugaaacugaugaggccgaaaggccgaaacaccu

SEQ ID NO: 3775 - RNA, 32 nt, Artificial Sequence
  Description of Artificial Sequence:  Nucleic Acid
auggacugaugaggccgaaaggccgaaacacg

SEQ ID NO: 3776 - RNA, 34 nt, Artificial Sequence
  Description of Artificial Sequence:  Nucleic Acid
ugaaagcugaugaggccgaaaggccgaaacucuu

SEQ ID NO: 3777 - RNA, 32 nt, Artificial Sequence
  Description of Artificial Sequence:  Nucleic Acid
cgagucugaugaggccgaaaggccgaaauagc

SEQ ID NO: 3778 - RNA, 34 nt, Artificial Sequence
  Description of Artificial Sequence:  Nucleic Acid
auggagcugaugaggccgaaaggccgaaagaagu

SEQ ID NO: 3779 - RNA, 36 nt, Artificial Sequence
  Description of Artificial Sequence:  Nucleic Acid
aggagcucugaugaggccgaaaggccgaaaucugac

SEQ ID NO: 3780 - RNA, 50 nt, Artificial Sequence
  Description of Artificial Sequence:  Nucleic Acid
ucuggaagaaguggaccagagaaacacacguugugguacauuaccuggua

SEQ ID NO: 3781 - RNA, 35 nt, Artificial Sequence
  Description of Artificial Sequence:  Nucleic Acid
  misc_feature (1)..(4): Phosphorothioate 3'-Internucleotide Linkage
  misc_feature (1)..(7): 2'-O-Methyl
  misc_feature (11)..(11): 2'-O-Methyl
  misc_feature (13)..(25): 2'-O-Methyl
  misc_feature (27)..(28): 2'-O-Methyl
  misc_feature (30)..(34): 2'-O-Methyl
  misc_feature (8)..(8): 2'-deoxy-2'-C-Allyl
  misc_feature (35)..(35): n stands for inverted deoxyabasic derivative
ugguggcugaugaggccguuaggccgaaaucugun

SEQ ID NO: 3782 - RNA, 37 nt, Artificial Sequence
  Description of Artificial Sequence:  Nucleic Acid
  misc_feature (1)..(4): Phosphorothioate 3'-Internucleotide Linkage
  misc_feature (1)..(8): 2'-O-Methyl
  misc_feature (12)..(12): 2'-O-Methyl
  misc_feature (14)..(26): 2'-O-Methyl
  misc_feature (28)..(29): 2'-O-Methyl
  misc_feature (31)..(36): 2'-O-Methyl
  misc_feature (9)..(9): 2'-deoxy-2'-C-Allyl
  misc_feature (37)..(37): n stands for inverted deoxyabasic derivative
uugguggcugaugaggccguuaggccgaaaucugugn

SEQ ID NO: 3783 - RNA, 35 nt, Artificial Sequence
  Description of Artificial Sequence:  Nucleic Acid
  misc_feature (1)..(4): Phosphorothioate 3'-Internucleotide Linkage
  misc_feature (1)..(7): 2'-O-Methyl
  misc_feature (11)..(11): 2'-O-Methyl
  misc_feature (13)..(25): 2'-O-Methyl
  misc_feature (27)..(28): 2'-O-Methyl
  misc_feature (30)..(34): 2'-O-Methyl
  misc_feature (8)..(8): 2'-deoxy-2'-C-Allyl
  misc_feature (35)..(35): n stands for inverted deoxyabasic derivative
ccugugcugaugaggccguuaggccgaaagccaun

SEQ ID NO: 3784 - RNA, 35 nt, Artificial Sequence
  Description of Artificial Sequence:  Nucleic Acid
  misc_feature (1)..(4): Phosphorothioate 3'-Internucleotide Linkage
  misc_feature (1)..(7): 2'-O-Methyl
  misc_feature (11)..(11): 2'-O-Methyl
  misc_feature (13)..(25): 2'-O-Methyl
  misc_feature (27)..(28): 2'-O-Methyl
  misc_feature (30)..(34): 2'-O-Methyl
  misc_feature (8)..(8): 2'-deoxy-2'-C-Allyl
  misc_feature (35)..(35): n stands for inverted deoxyabasic derivative
gaucuucugaugaggccguuaggccgaaagcucgn

SEQ ID NO: 3785 - RNA, 37 nt, Artificial Sequence
  Description of Artificial Sequence:  Nucleic Acid
  misc_feature (1)..(4): Phosphorothioate 3'-Internucleotide Linkage
  misc_feature (1)..(8): 2'-O-Methyl
  misc_feature (12)..(12): 2'-O-Methyl
  misc_feature (14)..(26): 2'-O-Methyl
  misc_feature (28)..(29): 2'-O-Methyl
  misc_feature (31)..(36): 2'-O-Methyl
  misc_feature (9)..(9): 2'-deoxy-2'-C-Allyl
  misc_feature (37)..(37): n stands for inverted deoxyabasic derivative
agaucuucugaugaggccguuaggccgaaagcucggn

SEQ ID NO: 3786 - RNA, 35 nt, Artificial Sequence
  Description of Artificial Sequence:  Nucleic Acid
  misc_feature (1)..(4): Phosphorothioate 3'-Internucleotide Linkage
  misc_feature (1)..(7): 2'-O-Methyl
  misc_feature (11)..(11): 2'-O-Methyl
  misc_feature (13)..(25): 2'-O-Methyl
  misc_feature (27)..(28): 2'-O-Methyl
  misc_feature (30)..(34): 2'-O-Methyl
  misc_feature (8)..(8): 2'-deoxy-2'-C-Allyl
  misc_feature (35)..(35): n stands for inverted deoxyabasic derivative
gugaaacugaugaggccguuaggccgaaacaccun

SEQ ID NO: 3787 - RNA, 35 nt, Artificial Sequence
  Description of Artificial Sequence:  Nucleic Acid
  misc_feature (1)..(4): Phosphorothioate 3'-Internucleotide Linkage
  misc_feature (1)..(7): 2'-O-Methyl
  misc_feature (11)..(11): 2'-O-Methyl
  misc_feature (13)..(25): 2'-O-Methyl
  misc_feature (27)..(28): 2'-O-Methyl
  misc_feature (30)..(34): 2'-O-Methyl
  misc_feature (8)..(8): 2'-deoxy-2'-C-Allyl
  misc_feature (35)..(35): n stands for inverted deoxyabasic derivative
cccgugcugaugaggccguuaggccgaaaauacan

SEQ ID NO: 3788 - RNA, 37 nt, Artificial Sequence
  Description of Artificial Sequence:  Nucleic Acid
  misc_feature (1)..(4): Phosphorothioate 3'-Internucleotide Linkage
  misc_feature (1)..(8): 2'-O-Methyl
  misc_feature (12)..(12): 2'-O-Methyl
  misc_feature (14)..(26): 2'-O-Methyl
  misc_feature (28)..(29): 2'-O-Methyl
  misc_feature (31)..(36): 2'-O-Methyl
  misc_feature (9)..(9): 2'-deoxy-2'-C-Allyl
  misc_feature (37)..(37): n stands for inverted deoxyabasic derivative
ucccgugcugaugaggccguuaggccgaaaauacacn

SEQ ID NO: 3789 - RNA, 37 nt, Artificial Sequence
  Description of Artificial Sequence:  Nucleic Acid
  misc_feature (1)..(4): Phosphorothioate 3'-Internucleotide Linkage
  misc_feature (1)..(8): 2'-O-Methyl
  misc_feature (12)..(12): 2'-O-Methyl
  misc_feature (14)..(26): 2'-O-Methyl
  misc_feature (28)..(29): 2'-O-Methyl
  misc_feature (31)..(36): 2'-O-Methyl
  misc_feature (9)..(9): 2'-deoxy-2'-C-Allyl
  misc_feature (37)..(37): n stands for inverted deoxyabasic derivative
gucccgucugaugaggccguuaggccgaaaaauacan

SEQ ID NO: 3790 - RNA, 35 nt, Artificial Sequence
  Description of Artificial Sequence:  Nucleic Acid
  misc_feature (1)..(4): Phosphorothioate 3'-Internucleotide Linkage
  misc_feature (1)..(7): 2'-O-Methyl
  misc_feature (11)..(11): 2'-O-Methyl
  misc_feature (13)..(25): 2'-O-Methyl
  misc_feature (27)..(28): 2'-O-Methyl
  misc_feature (30)..(34): 2'-O-Methyl
  misc_feature (8)..(8): 2'-deoxy-2'-C-Allyl
  misc_feature (35)..(35): n stands for inverted deoxyabasic derivative
gaaaagcugaugaggccguuaggccgaaagccucn

SEQ ID NO: 3791 - RNA, 35 nt, Artificial Sequence
  Description of Artificial Sequence:  Nucleic Acid
  misc_feature (1)..(4): Phosphorothioate 3'-Internucleotide Linkage
  misc_feature (1)..(7): 2'-O-Methyl
  misc_feature (11)..(11): 2'-O-Methyl
  misc_feature (13)..(25): 2'-O-Methyl
  misc_feature (27)..(28): 2'-O-Methyl
  misc_feature (30)..(34): 2'-O-Methyl
  misc_feature (8)..(8): 2'-deoxy-2'-C-Allyl
  misc_feature (35)..(35): n stands for inverted deoxyabasic derivative
guccggcugaugaggccguuaggccgaaacacaan

SEQ ID NO: 3792 - RNA, 35 nt, Artificial Sequence
  Description of Artificial Sequence:  Nucleic Acid
  misc_feature (1)..(4): Phosphorothioate 3'-Internucleotide Linkage
  misc_feature (1)..(7): 2'-O-Methyl
  misc_feature (11)..(11): 2'-O-Methyl
  misc_feature (13)..(25): 2'-O-Methyl
  misc_feature (27)..(28): 2'-O-Methyl
  misc_feature (30)..(34): 2'-O-Methyl
  misc_feature (8)..(8): 2'-deoxy-2'-C-Allyl
  misc_feature (35)..(35): n stands for inverted deoxyabasic derivative
cucuugcugaugaggccguuaggccgaaaggucun

SEQ ID NO: 3793 - RNA, 35 nt, Artificial Sequence
  Description of Artificial Sequence:  Nucleic Acid
  misc_feature (1)..(4): Phosphorothioate 3'-Internucleotide Linkage
  misc_feature (1)..(7): 2'-O-Methyl
  misc_feature (11)..(11): 2'-O-Methyl
  misc_feature (13)..(25): 2'-O-Methyl
  misc_feature (27)..(28): 2'-O-Methyl
  misc_feature (30)..(34): 2'-O-Methyl
  misc_feature (8)..(8): 2'-deoxy-2'-C-Allyl
  misc_feature (35)..(35): n stands for inverted deoxyabasic derivative
cuugggcugaugaggccguuaggccgaaacagaan

SEQ ID NO: 3794 - RNA, 37 nt, Artificial Sequence
  Description of Artificial Sequence:  Nucleic Acid
  misc_feature (1)..(4): Phosphorothioate 3'-Internucleotide Linkage
  misc_feature (1)..(8): 2'-O-Methyl
  misc_feature (12)..(12): 2'-O-Methyl
  misc_feature (14)..(26): 2'-O-Methyl
  misc_feature (28)..(29): 2'-O-Methyl
  misc_feature (31)..(36): 2'-O-Methyl
  misc_feature (9)..(9): 2'-deoxy-2'-C-Allyl
  misc_feature (37)..(37): n stands for inverted deoxyabasic derivative
gcuugggcugaugaggccguuaggccgaaacagaagn

SEQ ID NO: 3795 - RNA, 35 nt, Artificial Sequence
  Description of Artificial Sequence:  Nucleic Acid
  misc_feature (1)..(4): Phosphorothioate 3'-Internucleotide Linkage
  misc_feature (1)..(7): 2'-O-Methyl
  misc_feature (11)..(11): 2'-O-Methyl
  misc_feature (13)..(25): 2'-O-Methyl
  misc_feature (27)..(28): 2'-O-Methyl
  misc_feature (30)..(34): 2'-O-Methyl
  misc_feature (8)..(8): 2'-deoxy-2'-C-Allyl
  misc_feature (35)..(35): n stands for inverted deoxyabasic derivative
ucagggcugaugaggccguuaggccgaaacuccan

SEQ ID NO: 3796 - RNA, 37 nt, Artificial Sequence
  Description of Artificial Sequence:  Nucleic Acid
  misc_feature (1)..(4): Phosphorothioate 3'-Internucleotide Linkage
  misc_feature (1)..(8): 2'-O-Methyl
  misc_feature (12)..(12): 2'-O-Methyl
  misc_feature (14)..(26): 2'-O-Methyl
  misc_feature (28)..(29): 2'-O-Methyl
  misc_feature (31)..(36): 2'-O-Methyl
  misc_feature (9)..(9): 2'-deoxy-2'-C-Allyl
  misc_feature (37)..(37): n stands for inverted deoxyabasic derivative
aauggagcugaugaggccguuaggccgaaagaagucn

SEQ ID NO: 3797 - RNA, 37 nt, Artificial Sequence
  Description of Artificial Sequence:  Nucleic Acid
  misc_feature (1)..(4): Phosphorothioate 3'-Internucleotide Linkage
  misc_feature (1)..(8): 2'-O-Methyl
  misc_feature (12)..(12): 2'-O-Methyl
  misc_feature (14)..(26): 2'-O-Methyl
  misc_feature (28)..(29): 2'-O-Methyl
  misc_feature (31)..(36): 2'-O-Methyl
  misc_feature (9)..(9): 2'-deoxy-2'-C-Allyl
  misc_feature (37)..(37): n stands for inverted deoxyabasic derivative
cgcaaugcugaugaggccguuaggccgaaaggagaan

SEQ ID NO: 3798 - RNA, 37 nt, Artificial Sequence
  Description of Artificial Sequence:  Nucleic Acid
  misc_feature (1)..(4): Phosphorothioate 3'-Internucleotide Linkage
  misc_feature (1)..(8): 2'-O-Methyl
  misc_feature (12)..(12): 2'-O-Methyl
  misc_feature (14)..(26): 2'-O-Methyl
  misc_feature (28)..(29): 2'-O-Methyl
  misc_feature (31)..(36): 2'-O-Methyl
  misc_feature (9)..(9): 2'-deoxy-2'-C-Allyl
  misc_feature (37)..(37): n stands for inverted deoxyabasic derivative
aggagcucugaugaggccguuaggccgaaaucugacn

SEQ ID NO: 3799 - RNA, 35 nt, Artificial Sequence
  Description of Artificial Sequence:  Nucleic Acid
  misc_feature (1)..(4): Phosphorothioate 3'-Internucleotide Linkage
  misc_feature (1)..(7): 2'-O-Methyl
  misc_feature (11)..(11): 2'-O-Methyl
  misc_feature (13)..(25): 2'-O-Methyl
  misc_feature (27)..(28): 2'-O-Methyl
  misc_feature (30)..(34): 2'-O-Methyl
  misc_feature (8)..(8): 2'-deoxy-2'-C-Allyl
  misc_feature (35)..(35): n stands for inverted deoxyabasic derivative
gagcaacugaugaggccguuaggccgaaaguccan

SEQ ID NO: 3800 - RNA, 37 nt, Artificial Sequence
  Description of Artificial Sequence:  Nucleic Acid
  misc_feature (1)..(4): Phosphorothioate 3'-Internucleotide Linkage
  misc_feature (1)..(8): 2'-O-Methyl
  misc_feature (12)..(12): 2'-O-Methyl
  misc_feature (14)..(26): 2'-O-Methyl
  misc_feature (28)..(29): 2'-O-Methyl
  misc_feature (31)..(36): 2'-O-Methyl
  misc_feature (9)..(9): 2'-deoxy-2'-C-Allyl
  misc_feature (37)..(37): n stands for inverted deoxyabasic derivative
agagcaacugaugaggccguuaggccgaaaguccaan

SEQ ID NO: 3801 - RNA, 35 nt, Artificial Sequence
  Description of Artificial Sequence:  Nucleic Acid
  misc_feature (1)..(4): Phosphorothioate 3'-Internucleotide Linkage
  misc_feature (1)..(7): 2'-O-Methyl
  misc_feature (11)..(11): 2'-O-Methyl
  misc_feature (13)..(25): 2'-O-Methyl
  misc_feature (27)..(28): 2'-O-Methyl
  misc_feature (30)..(34): 2'-O-Methyl
  misc_feature (8)..(8): 2'-deoxy-2'-C-Allyl
  misc_feature (35)..(35): n stands for inverted deoxyabasic derivative
aagagccugaugaggccguuaggccgaaagagucn

SEQ ID NO: 3802 - RNA, 37 nt, Artificial Sequence
  Description of Artificial Sequence:  Nucleic Acid
  misc_feature (1)..(4): Phosphorothioate 3'-Internucleotide Linkage
  misc_feature (1)..(8): 2'-O-Methyl
  misc_feature (12)..(12): 2'-O-Methyl
  misc_feature (14)..(26): 2'-O-Methyl
  misc_feature (28)..(29): 2'-O-Methyl
  misc_feature (31)..(36): 2'-O-Methyl
  misc_feature (9)..(9): 2'-deoxy-2'-C-Allyl
  misc_feature (37)..(37): n stands for inverted deoxyabasic derivative
aaagagccugaugaggccguuaggccgaaagaguccn

SEQ ID NO: 3803 - RNA, 35 nt, Artificial Sequence
  Description of Artificial Sequence:  Nucleic Acid
  misc_feature (1)..(4): Phosphorothioate 3'-Internucleotide Linkage
  misc_feature (1)..(7): 2'-O-Methyl
  misc_feature (11)..(11): 2'-O-Methyl
  misc_feature (13)..(25): 2'-O-Methyl
  misc_feature (27)..(28): 2'-O-Methyl
  misc_feature (30)..(34): 2'-O-Methyl
  misc_feature (8)..(8): 2'-deoxy-2'-C-Allyl
  misc_feature (35)..(35): n stands for inverted deoxyabasic derivative
uagaaacugaugaggccguuaggccgaaagcaagn

SEQ ID NO: 3804 - RNA, 35 nt, Artificial Sequence
  Description of Artificial Sequence:  Nucleic Acid
  misc_feature (1)..(4): Phosphorothioate 3'-Internucleotide Linkage
  misc_feature (1)..(7): 2'-O-Methyl
  misc_feature (11)..(11): 2'-O-Methyl
  misc_feature (13)..(25): 2'-O-Methyl
  misc_feature (27)..(28): 2'-O-Methyl
  misc_feature (30)..(34): 2'-O-Methyl
  misc_feature (8)..(8): 2'-deoxy-2'-C-Allyl
  misc_feature (35)..(35): n stands for inverted deoxyabasic derivative
ucgaaccuagugacgccguuaggcggaaagucgun

SEQ ID NO: 3805 - RNA, 37 nt, Artificial Sequence
  Description of Artificial Sequence:  Nucleic Acid
  misc_feature (1)..(4): Phosphorothioate 3'-Internucleotide Linkage
  misc_feature (1)..(8): 2'-O-Methyl
  misc_feature (12)..(12): 2'-O-Methyl
  misc_feature (14)..(26): 2'-O-Methyl
  misc_feature (28)..(29): 2'-O-Methyl
  misc_feature (31)..(36): 2'-O-Methyl
  misc_feature (9)..(9): 2'-deoxy-2'-C-Allyl
  misc_feature (37)..(37): n stands for inverted deoxyabasic derivative
cgcgguacuagugacgccguuaggcggaaacaggcun

SEQ ID NO: 3806 - RNA, 35 nt, Artificial Sequence
  Description of Artificial Sequence:  Nucleic Acid
  misc_feature (1)..(4): Phosphorothioate 3'-Internucleotide Linkage
  misc_feature (1)..(7): 2'-O-Methyl
  misc_feature (11)..(11): 2'-O-Methyl
  misc_feature (13)..(25): 2'-O-Methyl
  misc_feature (27)..(28): 2'-O-Methyl
  misc_feature (30)..(34): 2'-O-Methyl
  misc_feature (8)..(8): 2'-deoxy-2'-C-Allyl
  misc_feature (29)..(29): n stands for inosine
  misc_feature (35)..(35): n stands for inverted deoxyabasic derivative
ucuuggcugaugaggccguuaggccgaanguaucn

SEQ ID NO: 3807 - RNA, 37 nt, Artificial Sequence
  Description of Artificial Sequence:  Nucleic Acid
  misc_feature (1)..(4): Phosphorothioate 3'-Internucleotide Linkage
  misc_feature (1)..(8): 2'-O-Methyl
  misc_feature (12)..(12): 2'-O-Methyl
  misc_feature (14)..(26): 2'-O-Methyl
  misc_feature (28)..(29): 2'-O-Methyl
  misc_feature (31)..(36): 2'-O-Methyl
  misc_feature (9)..(9): 2'-deoxy-2'-C-Allyl
  misc_feature (30)..(30): n stands for inosine
  misc_feature (37)..(37): n stands for inverted deoxyabasic derivative
gucuuggcugaugaggccguuaggccgaanguaucun

SEQ ID NO: 3808 - RNA, 35 nt, Artificial Sequence
  Description of Artificial Sequence:  Nucleic Acid
  misc_feature (1)..(4): Phosphorothioate 3'-Internucleotide Linkage
  misc_feature (1)..(7): 2'-O-Methyl
  misc_feature (11)..(11): 2'-O-Methyl
  misc_feature (13)..(25): 2'-O-Methyl
  misc_feature (27)..(28): 2'-O-Methyl
  misc_feature (30)..(34): 2'-O-Methyl
  misc_feature (8)..(8): 2'-deoxy-2'-C-Allyl
  misc_feature (29)..(29): n stands for inosine
  misc_feature (35)..(35): n stands for inverted deoxyabasic derivative
ucuugacugaugaggccguuaggccgaangugggn

SEQ ID NO: 3809 - RNA, 35 nt, Artificial Sequence
  Description of Artificial Sequence:  Nucleic Acid
  misc_feature (1)..(4): Phosphorothioate 3'-Internucleotide Linkage
  misc_feature (1)..(7): 2'-O-Methyl
  misc_feature (11)..(11): 2'-O-Methyl
  misc_feature (13)..(25): 2'-O-Methyl
  misc_feature (27)..(28): 2'-O-Methyl
  misc_feature (30)..(34): 2'-O-Methyl
  misc_feature (8)..(8): 2'-deoxy-2'-C-Allyl
  misc_feature (29)..(29): n stands for inosine
  misc_feature (35)..(35): n stands for inverted deoxyabasic derivative
ugaucucugaugaggccguuaggccgaanauggun

SEQ ID NO: 3810 - RNA, 37 nt, Artificial Sequence
  Description of Artificial Sequence:  Nucleic Acid
  misc_feature (1)..(4): Phosphorothioate 3'-Internucleotide Linkage
  misc_feature (1)..(8): 2'-O-Methyl
  misc_feature (12)..(12): 2'-O-Methyl
  misc_feature (14)..(26): 2'-O-Methyl
  misc_feature (28)..(29): 2'-O-Methyl
  misc_feature (31)..(36): 2'-O-Methyl
  misc_feature (9)..(9): 2'-deoxy-2'-C-Allyl
  misc_feature (30)..(30): n stands for inosine
  misc_feature (37)..(37): n stands for inverted deoxyabasic derivative
uugaucucugaugaggccguuaggccgaanauggugn

SEQ ID NO: 3811 - RNA, 35 nt, Artificial Sequence
  Description of Artificial Sequence:  Nucleic Acid
  misc_feature (1)..(4): Phosphorothioate 3'-Internucleotide Linkage
  misc_feature (1)..(7): 2'-O-Methyl
  misc_feature (11)..(11): 2'-O-Methyl
  misc_feature (13)..(25): 2'-O-Methyl
  misc_feature (27)..(28): 2'-O-Methyl
  misc_feature (30)..(34): 2'-O-Methyl
  misc_feature (8)..(8): 2'-deoxy-2'-C-Allyl
  misc_feature (29)..(29): n stands for inosine
  misc_feature (35)..(35): n stands for inverted deoxyabasic derivative
agccaucugaugaggccguuaggccgaanaucuun

SEQ ID NO: 3812 - RNA, 37 nt, Artificial Sequence
  Description of Artificial Sequence:  Nucleic Acid
  misc_feature (1)..(4): Phosphorothioate 3'-Internucleotide Linkage
  misc_feature (1)..(8): 2'-O-Methyl
  misc_feature (12)..(12): 2'-O-Methyl
  misc_feature (14)..(26): 2'-O-Methyl
  misc_feature (28)..(29): 2'-O-Methyl
  misc_feature (31)..(36): 2'-O-Methyl
  misc_feature (9)..(9): 2'-deoxy-2'-C-Allyl
  misc_feature (30)..(30): n stands for inosine
  misc_feature (37)..(37): n stands for inverted deoxyabasic derivative
uagccaucugaugaggccguuaggccgaanaucuugn

SEQ ID NO: 3813 - RNA, 35 nt, Artificial Sequence
  Description of Artificial Sequence:  Nucleic Acid
  misc_feature (1)..(4): Phosphorothioate 3'-Internucleotide Linkage
  misc_feature (1)..(7): 2'-O-Methyl
  misc_feature (11)..(11): 2'-O-Methyl
  misc_feature (13)..(25): 2'-O-Methyl
  misc_feature (27)..(28): 2'-O-Methyl
  misc_feature (30)..(34): 2'-O-Methyl
  misc_feature (8)..(8): 2'-deoxy-2'-C-Allyl
  misc_feature (29)..(29): n stands for inosine
  misc_feature (35)..(35): n stands for inverted deoxyabasic derivative
cugugucugaugaggccguuaggccgaanccauun

SEQ ID NO: 3814 - RNA, 37 nt, Artificial Sequence
  Description of Artificial Sequence:  Nucleic Acid
  misc_feature (1)..(4): Phosphorothioate 3'-Internucleotide Linkage
  misc_feature (1)..(8): 2'-O-Methyl
  misc_feature (12)..(12): 2'-O-Methyl
  misc_feature (14)..(26): 2'-O-Methyl
  misc_feature (28)..(29): 2'-O-Methyl
  misc_feature (31)..(36): 2'-O-Methyl
  misc_feature (9)..(9): 2'-deoxy-2'-C-Allyl
  misc_feature (30)..(30): n stands for inosine
  misc_feature (37)..(37): n stands for inverted deoxyabasic derivative
ccugugucugaugaggccguuaggccgaanccauugn

SEQ ID NO: 3815 - RNA, 35 nt, Artificial Sequence
  Description of Artificial Sequence:  Nucleic Acid
  misc_feature (1)..(4): Phosphorothioate 3'-Internucleotide Linkage
  misc_feature (1)..(7): 2'-O-Methyl
  misc_feature (11)..(11): 2'-O-Methyl
  misc_feature (13)..(25): 2'-O-Methyl
  misc_feature (27)..(28): 2'-O-Methyl
  misc_feature (30)..(34): 2'-O-Methyl
  misc_feature (8)..(8): 2'-deoxy-2'-C-Allyl
  misc_feature (29)..(29): n stands for inosine
  misc_feature (35)..(35): n stands for inverted deoxyabasic derivative
cauccccugaugaggccguuaggccgaancagucn

SEQ ID NO: 3816 - RNA, 35 nt, Artificial Sequence
  Description of Artificial Sequence:  Nucleic Acid
  misc_feature (1)..(4): Phosphorothioate 3'-Internucleotide Linkage
  misc_feature (1)..(7): 2'-O-Methyl
  misc_feature (11)..(11): 2'-O-Methyl
  misc_feature (13)..(25): 2'-O-Methyl
  misc_feature (27)..(28): 2'-O-Methyl
  misc_feature (30)..(34): 2'-O-Methyl
  misc_feature (8)..(8): 2'-deoxy-2'-C-Allyl
  misc_feature (29)..(29): n stands for inosine
  misc_feature (35)..(35): n stands for inverted deoxyabasic derivative
ccuggacugaugaggccguuaggccgaancagagn

SEQ ID NO: 3817 - RNA, 35 nt, Artificial Sequence
  Description of Artificial Sequence:  Nucleic Acid
  misc_feature (1)..(4): Phosphorothioate 3'-Internucleotide Linkage
  misc_feature (1)..(7): 2'-O-Methyl
  misc_feature (11)..(11): 2'-O-Methyl
  misc_feature (13)..(25): 2'-O-Methyl
  misc_feature (27)..(28): 2'-O-Methyl
  misc_feature (30)..(34): 2'-O-Methyl
  misc_feature (8)..(8): 2'-deoxy-2'-C-Allyl
  misc_feature (29)..(29): n stands for inosine
  misc_feature (35)..(35): n stands for inverted deoxyabasic derivative
ccgcaccugaugaggccguuaggccgaanucaccn

SEQ ID NO: 3818 - RNA, 37 nt, Artificial Sequence
  Description of Artificial Sequence:  Nucleic Acid
  misc_feature (1)..(4): Phosphorothioate 3'-Internucleotide Linkage
  misc_feature (1)..(8): 2'-O-Methyl
  misc_feature (12)..(12): 2'-O-Methyl
  misc_feature (14)..(26): 2'-O-Methyl
  misc_feature (28)..(29): 2'-O-Methyl
  misc_feature (31)..(36): 2'-O-Methyl
  misc_feature (9)..(9): 2'-deoxy-2'-C-Allyl
  misc_feature (30)..(30): n stands for inosine
  misc_feature (37)..(37): n stands for inverted deoxyabasic derivative
cccgcaccugaugaggccguuaggccgaanucaccun

SEQ ID NO: 3819 - RNA, 35 nt, Artificial Sequence
  Description of Artificial Sequence:  Nucleic Acid
  misc_feature (1)..(4): Phosphorothioate 3'-Internucleotide Linkage
  misc_feature (1)..(7): 2'-O-Methyl
  misc_feature (11)..(11): 2'-O-Methyl
  misc_feature (13)..(25): 2'-O-Methyl
  misc_feature (27)..(28): 2'-O-Methyl
  misc_feature (30)..(34): 2'-O-Methyl
  misc_feature (8)..(8): 2'-deoxy-2'-C-Allyl
  misc_feature (29)..(29): n stands for inosine
  misc_feature (35)..(35): n stands for inverted deoxyabasic derivative
gagcuccugaugaggccguuaggccgaancagugn

SEQ ID NO: 3820 - RNA, 37 nt, Artificial Sequence
  Description of Artificial Sequence:  Nucleic Acid
  misc_feature (1)..(4): Phosphorothioate 3'-Internucleotide Linkage
  misc_feature (1)..(8): 2'-O-Methyl
  misc_feature (12)..(12): 2'-O-Methyl
  misc_feature (14)..(26): 2'-O-Methyl
  misc_feature (28)..(29): 2'-O-Methyl
  misc_feature (31)..(36): 2'-O-Methyl
  misc_feature (9)..(9): 2'-deoxy-2'-C-Allyl
  misc_feature (30)..(30): n stands for inosine
  misc_feature (37)..(37): n stands for inverted deoxyabasic derivative
ugagcuccugaugaggccguuaggccgaancagugun

SEQ ID NO: 3821 - RNA, 35 nt, Artificial Sequence
  Description of Artificial Sequence:  Nucleic Acid
  misc_feature (1)..(4): Phosphorothioate 3'-Internucleotide Linkage
  misc_feature (1)..(7): 2'-O-Methyl
  misc_feature (11)..(11): 2'-O-Methyl
  misc_feature (13)..(25): 2'-O-Methyl
  misc_feature (27)..(28): 2'-O-Methyl
  misc_feature (30)..(34): 2'-O-Methyl
  misc_feature (8)..(8): 2'-deoxy-2'-C-Allyl
  misc_feature (29)..(29): n stands for inosine
  misc_feature (35)..(35): n stands for inverted deoxyabasic derivative
aucuugcugaugaggccguuaggccgaancucggn

SEQ ID NO: 3822 - RNA, 35 nt, Artificial Sequence
  Description of Artificial Sequence:  Nucleic Acid
  misc_feature (1)..(4): Phosphorothioate 3'-Internucleotide Linkage
  misc_feature (1)..(7): 2'-O-Methyl
  misc_feature (11)..(11): 2'-O-Methyl
  misc_feature (13)..(25): 2'-O-Methyl
  misc_feature (27)..(28): 2'-O-Methyl
  misc_feature (30)..(34): 2'-O-Methyl
  misc_feature (8)..(8): 2'-deoxy-2'-C-Allyl
  misc_feature (29)..(29): n stands for inosine
  misc_feature (35)..(35): n stands for inverted deoxyabasic derivative
agaucucugaugaggccguuaggccgaanagcucn

SEQ ID NO: 3823 - RNA, 35 nt, Artificial Sequence
  Description of Artificial Sequence:  Nucleic Acid
  misc_feature (1)..(4): Phosphorothioate 3'-Internucleotide Linkage
  misc_feature (1)..(7): 2'-O-Methyl
  misc_feature (11)..(11): 2'-O-Methyl
  misc_feature (13)..(25): 2'-O-Methyl
  misc_feature (27)..(28): 2'-O-Methyl
  misc_feature (30)..(34): 2'-O-Methyl
  misc_feature (8)..(8): 2'-deoxy-2'-C-Allyl
  misc_feature (29)..(29): n stands for inosine
  misc_feature (35)..(35): n stands for inverted deoxyabasic derivative
ucuuuccugaugaggccguuaggccgaancaccun

SEQ ID NO: 3824 - RNA, 37 nt, Artificial Sequence
  Description of Artificial Sequence:  Nucleic Acid
  misc_feature (1)..(4): Phosphorothioate 3'-Internucleotide Linkage
  misc_feature (1)..(8): 2'-O-Methyl
  misc_feature (12)..(12): 2'-O-Methyl
  misc_feature (14)..(26): 2'-O-Methyl
  misc_feature (28)..(29): 2'-O-Methyl
  misc_feature (31)..(36): 2'-O-Methyl
  misc_feature (9)..(9): 2'-deoxy-2'-C-Allyl
  misc_feature (30)..(30): n stands for inosine
  misc_feature (37)..(37): n stands for inverted deoxyabasic derivative
ggucccgcugaugaggccguuaggccgaanaaauacn

SEQ ID NO: 3825 - RNA, 35 nt, Artificial Sequence
  Description of Artificial Sequence:  Nucleic Acid
  misc_feature (1)..(4): Phosphorothioate 3'-Internucleotide Linkage
  misc_feature (1)..(7): 2'-O-Methyl
  misc_feature (11)..(11): 2'-O-Methyl
  misc_feature (13)..(25): 2'-O-Methyl
  misc_feature (27)..(28): 2'-O-Methyl
  misc_feature (30)..(34): 2'-O-Methyl
  misc_feature (8)..(8): 2'-deoxy-2'-C-Allyl
  misc_feature (29)..(29): n stands for inosine
  misc_feature (35)..(35): n stands for inverted deoxyabasic derivative
ccagcccugaugaggccguuaggccgaangucccn

SEQ ID NO: 3826 - RNA, 35 nt, Artificial Sequence
  Description of Artificial Sequence:  Nucleic Acid
  misc_feature (1)..(4): Phosphorothioate 3'-Internucleotide Linkage
  misc_feature (1)..(7): 2'-O-Methyl
  misc_feature (11)..(11): 2'-O-Methyl
  misc_feature (13)..(25): 2'-O-Methyl
  misc_feature (27)..(28): 2'-O-Methyl
  misc_feature (30)..(34): 2'-O-Methyl
  misc_feature (8)..(8): 2'-deoxy-2'-C-Allyl
  misc_feature (29)..(29): n stands for inosine
  misc_feature (35)..(35): n stands for inverted deoxyabasic derivative
cacaaucugaugaggccguuaggccgaanccacun

SEQ ID NO: 3827 - RNA, 37 nt, Artificial Sequence
  Description of Artificial Sequence:  Nucleic Acid
  misc_feature (1)..(4): Phosphorothioate 3'-Internucleotide Linkage
  misc_feature (1)..(8): 2'-O-Methyl
  misc_feature (12)..(12): 2'-O-Methyl
  misc_feature (14)..(26): 2'-O-Methyl
  misc_feature (28)..(29): 2'-O-Methyl
  misc_feature (31)..(36): 2'-O-Methyl
  misc_feature (9)..(9): 2'-deoxy-2'-C-Allyl
  misc_feature (30)..(30): n stands for inosine
  misc_feature (37)..(37): n stands for inverted deoxyabasic derivative
acacaaucugaugaggccguuaggccgaanccacuun

SEQ ID NO: 3828 - RNA, 35 nt, Artificial Sequence
  Description of Artificial Sequence:  Nucleic Acid
  misc_feature (1)..(4): Phosphorothioate 3'-Internucleotide Linkage
  misc_feature (1)..(7): 2'-O-Methyl
  misc_feature (11)..(11): 2'-O-Methyl
  misc_feature (13)..(25): 2'-O-Methyl
  misc_feature (27)..(28): 2'-O-Methyl
  misc_feature (30)..(34): 2'-O-Methyl
  misc_feature (8)..(8): 2'-deoxy-2'-C-Allyl
  misc_feature (29)..(29): n stands for inosine
  misc_feature (35)..(35): n stands for inverted deoxyabasic derivative
acacaacugaugaggccguuaggccgaangccacn

SEQ ID NO: 3829 - RNA, 37 nt, Artificial Sequence
  Description of Artificial Sequence:  Nucleic Acid
  misc_feature (1)..(4): Phosphorothioate 3'-Internucleotide Linkage
  misc_feature (1)..(8): 2'-O-Methyl
  misc_feature (12)..(12): 2'-O-Methyl
  misc_feature (14)..(26): 2'-O-Methyl
  misc_feature (28)..(29): 2'-O-Methyl
  misc_feature (31)..(36): 2'-O-Methyl
  misc_feature (9)..(9): 2'-deoxy-2'-C-Allyl
  misc_feature (30)..(30): n stands for inosine
  misc_feature (37)..(37): n stands for inverted deoxyabasic derivative
aacacaacugaugaggccguuaggccgaangccacun

SEQ ID NO: 3830 - RNA, 35 nt, Artificial Sequence
  Description of Artificial Sequence:  Nucleic Acid
  misc_feature (1)..(4): Phosphorothioate 3'-Internucleotide Linkage
  misc_feature (1)..(7): 2'-O-Methyl
  misc_feature (11)..(11): 2'-O-Methyl
  misc_feature (13)..(25): 2'-O-Methyl
  misc_feature (27)..(28): 2'-O-Methyl
  misc_feature (30)..(34): 2'-O-Methyl
  misc_feature (8)..(8): 2'-deoxy-2'-C-Allyl
  misc_feature (29)..(29): n stands for inosine
  misc_feature (35)..(35): n stands for inverted deoxyabasic derivative
gcugcacugaugaggccguuaggccgaangagacn

SEQ ID NO: 3831 - RNA, 35 nt, Artificial Sequence
  Description of Artificial Sequence:  Nucleic Acid
  misc_feature (1)..(4): Phosphorothioate 3'-Internucleotide Linkage
  misc_feature (1)..(7): 2'-O-Methyl
  misc_feature (11)..(11): 2'-O-Methyl
  misc_feature (13)..(25): 2'-O-Methyl
  misc_feature (27)..(28): 2'-O-Methyl
  misc_feature (30)..(34): 2'-O-Methyl
  misc_feature (8)..(8): 2'-deoxy-2'-C-Allyl
  misc_feature (29)..(29): n stands for inosine
  misc_feature (35)..(35): n stands for inverted deoxyabasic derivative
uccaugcugaugaggccguuaggccgaancucacn

SEQ ID NO: 3832 - RNA, 35 nt, Artificial Sequence
  Description of Artificial Sequence:  Nucleic Acid
  misc_feature (1)..(4): Phosphorothioate 3'-Internucleotide Linkage
  misc_feature (1)..(7): 2'-O-Methyl
  misc_feature (11)..(11): 2'-O-Methyl
  misc_feature (13)..(25): 2'-O-Methyl
  misc_feature (27)..(28): 2'-O-Methyl
  misc_feature (30)..(34): 2'-O-Methyl
  misc_feature (8)..(8): 2'-deoxy-2'-C-Allyl
  misc_feature (29)..(29): n stands for inosine
  misc_feature (35)..(35): n stands for inverted deoxyabasic derivative
cuggcacugaugaggccguuaggccgaanuacugn

SEQ ID NO: 3833 - RNA, 37 nt, Artificial Sequence
  Description of Artificial Sequence:  Nucleic Acid
  misc_feature (1)..(4): Phosphorothioate 3'-Internucleotide Linkage
  misc_feature (1)..(8): 2'-O-Methyl
  misc_feature (12)..(12): 2'-O-Methyl
  misc_feature (14)..(26): 2'-O-Methyl
  misc_feature (28)..(29): 2'-O-Methyl
  misc_feature (31)..(36): 2'-O-Methyl
  misc_feature (9)..(9): 2'-deoxy-2'-C-Allyl
  misc_feature (30)..(30): n stands for inosine
  misc_feature (37)..(37): n stands for inverted deoxyabasic derivative
ucuggcacugaugaggccguuaggccgaanuacuggn

SEQ ID NO: 3834 - RNA, 35 nt, Artificial Sequence
  Description of Artificial Sequence:  Nucleic Acid
  misc_feature (1)..(4): Phosphorothioate 3'-Internucleotide Linkage
  misc_feature (1)..(7): 2'-O-Methyl
  misc_feature (11)..(11): 2'-O-Methyl
  misc_feature (13)..(25): 2'-O-Methyl
  misc_feature (27)..(28): 2'-O-Methyl
  misc_feature (30)..(34): 2'-O-Methyl
  misc_feature (8)..(8): 2'-deoxy-2'-C-Allyl
  misc_feature (29)..(29): n stands for inosine
  misc_feature (35)..(35): n stands for inverted deoxyabasic derivative
cucauacugaugaggccguuaggccgaanuccuun

SEQ ID NO: 3835 - RNA, 37 nt, Artificial Sequence
  Description of Artificial Sequence:  Nucleic Acid
  misc_feature (1)..(4): Phosphorothioate 3'-Internucleotide Linkage
  misc_feature (1)..(8): 2'-O-Methyl
  misc_feature (12)..(12): 2'-O-Methyl
  misc_feature (14)..(26): 2'-O-Methyl
  misc_feature (28)..(29): 2'-O-Methyl
  misc_feature (31)..(36): 2'-O-Methyl
  misc_feature (9)..(9): 2'-deoxy-2'-C-Allyl
  misc_feature (30)..(30): n stands for inosine
  misc_feature (37)..(37): n stands for inverted deoxyabasic derivative
ucucauacugaugaggccguuaggccgaanuccuuun

SEQ ID NO: 3836 - RNA, 35 nt, Artificial Sequence
  Description of Artificial Sequence:  Nucleic Acid
  misc_feature (1)..(4): Phosphorothioate 3'-Internucleotide Linkage
  misc_feature (1)..(7): 2'-O-Methyl
  misc_feature (11)..(11): 2'-O-Methyl
  misc_feature (13)..(25): 2'-O-Methyl
  misc_feature (27)..(28): 2'-O-Methyl
  misc_feature (30)..(34): 2'-O-Methyl
  misc_feature (8)..(8): 2'-deoxy-2'-C-Allyl
  misc_feature (29)..(29): n stands for inosine
  misc_feature (35)..(35): n stands for inverted deoxyabasic derivative
gcuuggcugaugaggccguuaggccgaanacagan

SEQ ID NO: 3837 - RNA, 35 nt, Artificial Sequence
  Description of Artificial Sequence:  Nucleic Acid
  misc_feature (1)..(4): Phosphorothioate 3'-Internucleotide Linkage
  misc_feature (1)..(7): 2'-O-Methyl
  misc_feature (11)..(11): 2'-O-Methyl
  misc_feature (13)..(25): 2'-O-Methyl
  misc_feature (27)..(28): 2'-O-Methyl
  misc_feature (30)..(34): 2'-O-Methyl
  misc_feature (8)..(8): 2'-deoxy-2'-C-Allyl
  misc_feature (29)..(29): n stands for inosine
  misc_feature (35)..(35): n stands for inverted deoxyabasic derivative
ggcuugcugaugaggccguuaggccgaangacagn

SEQ ID NO: 3838 - RNA, 37 nt, Artificial Sequence
  Description of Artificial Sequence:  Nucleic Acid
  misc_feature (1)..(4): Phosphorothioate 3'-Internucleotide Linkage
  misc_feature (1)..(8): 2'-O-Methyl
  misc_feature (12)..(12): 2'-O-Methyl
  misc_feature (14)..(26): 2'-O-Methyl
  misc_feature (28)..(29): 2'-O-Methyl
  misc_feature (31)..(36): 2'-O-Methyl
  misc_feature (9)..(9): 2'-deoxy-2'-C-Allyl
  misc_feature (30)..(30): n stands for inosine
  misc_feature (37)..(37): n stands for inverted deoxyabasic derivative
uggcuugcugaugaggccguuaggccgaangacagan

SEQ ID NO: 3839 - RNA, 35 nt, Artificial Sequence
  Description of Artificial Sequence:  Nucleic Acid
  misc_feature (1)..(4): Phosphorothioate 3'-Internucleotide Linkage
  misc_feature (1)..(7): 2'-O-Methyl
  misc_feature (11)..(11): 2'-O-Methyl
  misc_feature (13)..(25): 2'-O-Methyl
  misc_feature (27)..(28): 2'-O-Methyl
  misc_feature (30)..(34): 2'-O-Methyl
  misc_feature (8)..(8): 2'-deoxy-2'-C-Allyl
  misc_feature (29)..(29): n stands for inosine
  misc_feature (35)..(35): n stands for inverted deoxyabasic derivative
aguugacugaugaggccguuaggccgaangugcun

SEQ ID NO: 3840 - RNA, 35 nt, Artificial Sequence
  Description of Artificial Sequence:  Nucleic Acid
  misc_feature (1)..(4): Phosphorothioate 3'-Internucleotide Linkage
  misc_feature (1)..(7): 2'-O-Methyl
  misc_feature (11)..(11): 2'-O-Methyl
  misc_feature (13)..(25): 2'-O-Methyl
  misc_feature (27)..(28): 2'-O-Methyl
  misc_feature (30)..(34): 2'-O-Methyl
  misc_feature (8)..(8): 2'-deoxy-2'-C-Allyl
  misc_feature (29)..(29): n stands for inosine
  misc_feature (35)..(35): n stands for inverted deoxyabasic derivative
cccccacugaugaggccguuaggccgaanucuucn

SEQ ID NO: 3841 - RNA, 37 nt, Artificial Sequence
  Description of Artificial Sequence:  Nucleic Acid
  misc_feature (1)..(4): Phosphorothioate 3'-Internucleotide Linkage
  misc_feature (1)..(8): 2'-O-Methyl
  misc_feature (12)..(12): 2'-O-Methyl
  misc_feature (14)..(26): 2'-O-Methyl
  misc_feature (28)..(29): 2'-O-Methyl
  misc_feature (31)..(36): 2'-O-Methyl
  misc_feature (9)..(9): 2'-deoxy-2'-C-Allyl
  misc_feature (30)..(30): n stands for inosine
  misc_feature (37)..(37): n stands for inverted deoxyabasic derivative
gcccccacugaugaggccguuaggccgaanucuucan

SEQ ID NO: 3842 - RNA, 35 nt, Artificial Sequence
  Description of Artificial Sequence:  Nucleic Acid
  misc_feature (1)..(4): Phosphorothioate 3'-Internucleotide Linkage
  misc_feature (1)..(7): 2'-O-Methyl
  misc_feature (11)..(11): 2'-O-Methyl
  misc_feature (13)..(25): 2'-O-Methyl
  misc_feature (27)..(28): 2'-O-Methyl
  misc_feature (30)..(34): 2'-O-Methyl
  misc_feature (8)..(8): 2'-deoxy-2'-C-Allyl
  misc_feature (29)..(29): n stands for inosine
  misc_feature (35)..(35): n stands for inverted deoxyabasic derivative
ggucugcugaugaggccguuaggccgaancuguun

SEQ ID NO: 3843 - RNA, 37 nt, Artificial Sequence
  Description of Artificial Sequence:  Nucleic Acid
  misc_feature (1)..(4): Phosphorothioate 3'-Internucleotide Linkage
  misc_feature (1)..(8): 2'-O-Methyl
  misc_feature (12)..(12): 2'-O-Methyl
  misc_feature (14)..(26): 2'-O-Methyl
  misc_feature (28)..(29): 2'-O-Methyl
  misc_feature (31)..(36): 2'-O-Methyl
  misc_feature (9)..(9): 2'-deoxy-2'-C-Allyl
  misc_feature (30)..(30): n stands for inosine
  misc_feature (37)..(37): n stands for inverted deoxyabasic derivative
gggucugcugaugaggccguuaggccgaancuguugn

SEQ ID NO: 3844 - RNA, 35 nt, Artificial Sequence
  Description of Artificial Sequence:  Nucleic Acid
  misc_feature (1)..(4): Phosphorothioate 3'-Internucleotide Linkage
  misc_feature (1)..(7): 2'-O-Methyl
  misc_feature (11)..(11): 2'-O-Methyl
  misc_feature (13)..(25): 2'-O-Methyl
  misc_feature (27)..(28): 2'-O-Methyl
  misc_feature (30)..(34): 2'-O-Methyl
  misc_feature (8)..(8): 2'-deoxy-2'-C-Allyl
  misc_feature (29)..(29): n stands for inosine
  misc_feature (35)..(35): n stands for inverted deoxyabasic derivative
uggguccugaugaggccguuaggccgaanugcugn

SEQ ID NO: 3845 - RNA, 37 nt, Artificial Sequence
  Description of Artificial Sequence:  Nucleic Acid
  misc_feature (1)..(4): Phosphorothioate 3'-Internucleotide Linkage
  misc_feature (1)..(8): 2'-O-Methyl
  misc_feature (12)..(12): 2'-O-Methyl
  misc_feature (14)..(26): 2'-O-Methyl
  misc_feature (28)..(29): 2'-O-Methyl
  misc_feature (31)..(36): 2'-O-Methyl
  misc_feature (9)..(9): 2'-deoxy-2'-C-Allyl
  misc_feature (30)..(30): n stands for inosine
  misc_feature (37)..(37): n stands for inverted deoxyabasic derivative
cuggguccugaugaggccguuaggccgaanugcugun

SEQ ID NO: 3846 - RNA, 35 nt, Artificial Sequence
  Description of Artificial Sequence:  Nucleic Acid
  misc_feature (1)..(4): Phosphorothioate 3'-Internucleotide Linkage
  misc_feature (1)..(7): 2'-O-Methyl
  misc_feature (11)..(11): 2'-O-Methyl
  misc_feature (13)..(25): 2'-O-Methyl
  misc_feature (27)..(28): 2'-O-Methyl
  misc_feature (30)..(34): 2'-O-Methyl
  misc_feature (8)..(8): 2'-deoxy-2'-C-Allyl
  misc_feature (29)..(29): n stands for inosine
  misc_feature (35)..(35): n stands for inverted deoxyabasic derivative
ggucugcugaugaggccguuaggccgaanaacacn

SEQ ID NO: 3847 - RNA, 35 nt, Artificial Sequence
  Description of Artificial Sequence:  Nucleic Acid
  misc_feature (1)..(4): Phosphorothioate 3'-Internucleotide Linkage
  misc_feature (1)..(7): 2'-O-Methyl
  misc_feature (11)..(11): 2'-O-Methyl
  misc_feature (13)..(25): 2'-O-Methyl
  misc_feature (27)..(28): 2'-O-Methyl
  misc_feature (30)..(34): 2'-O-Methyl
  misc_feature (8)..(8): 2'-deoxy-2'-C-Allyl
  misc_feature (29)..(29): n stands for inosine
  misc_feature (35)..(35): n stands for inverted deoxyabasic derivative
cagguccugaugaggccguuaggccgaanugaacn

SEQ ID NO: 3848 - RNA, 37 nt, Artificial Sequence
  Description of Artificial Sequence:  Nucleic Acid
  misc_feature (1)..(4): Phosphorothioate 3'-Internucleotide Linkage
  misc_feature (1)..(8): 2'-O-Methyl
  misc_feature (12)..(12): 2'-O-Methyl
  misc_feature (14)..(26): 2'-O-Methyl
  misc_feature (28)..(29): 2'-O-Methyl
  misc_feature (31)..(36): 2'-O-Methyl
  misc_feature (9)..(9): 2'-deoxy-2'-C-Allyl
  misc_feature (30)..(30): n stands for inosine
  misc_feature (37)..(37): n stands for inverted deoxyabasic derivative
ccagguccugaugaggccguuaggccgaanugaacan

SEQ ID NO: 3849 - RNA, 35 nt, Artificial Sequence
  Description of Artificial Sequence:  Nucleic Acid
  misc_feature (1)..(4): Phosphorothioate 3'-Internucleotide Linkage
  misc_feature (1)..(7): 2'-O-Methyl
  misc_feature (11)..(11): 2'-O-Methyl
  misc_feature (13)..(25): 2'-O-Methyl
  misc_feature (27)..(28): 2'-O-Methyl
  misc_feature (30)..(34): 2'-O-Methyl
  misc_feature (8)..(8): 2'-deoxy-2'-C-Allyl
  misc_feature (29)..(29): n stands for inosine
  misc_feature (35)..(35): n stands for inverted deoxyabasic derivative
augccacugaugaggccguuaggccgaanucugun

SEQ ID NO: 3850 - RNA, 37 nt, Artificial Sequence
  Description of Artificial Sequence:  Nucleic Acid
  misc_feature (1)..(4): Phosphorothioate 3'-Internucleotide Linkage
  misc_feature (1)..(8): 2'-O-Methyl
  misc_feature (12)..(12): 2'-O-Methyl
  misc_feature (14)..(26): 2'-O-Methyl
  misc_feature (28)..(29): 2'-O-Methyl
  misc_feature (31)..(36): 2'-O-Methyl
  misc_feature (9)..(9): 2'-deoxy-2'-C-Allyl
  misc_feature (30)..(30): n stands for inosine
  misc_feature (37)..(37): n stands for inverted deoxyabasic derivative
gaugccacugaugaggccguuaggccgaanucugugn

SEQ ID NO: 3851 - RNA, 35 nt, Artificial Sequence
  Description of Artificial Sequence:  Nucleic Acid
  misc_feature (1)..(4): Phosphorothioate 3'-Internucleotide Linkage
  misc_feature (1)..(7): 2'-O-Methyl
  misc_feature (11)..(11): 2'-O-Methyl
  misc_feature (13)..(25): 2'-O-Methyl
  misc_feature (27)..(28): 2'-O-Methyl
  misc_feature (30)..(34): 2'-O-Methyl
  misc_feature (8)..(8): 2'-deoxy-2'-C-Allyl
  misc_feature (29)..(29): n stands for inosine
  misc_feature (35)..(35): n stands for inverted deoxyabasic derivative
gaugcccugaugaggccguuaggccgaangucugn

SEQ ID NO: 3852 - RNA, 37 nt, Artificial Sequence
  Description of Artificial Sequence:  Nucleic Acid
  misc_feature (1)..(4): Phosphorothioate 3'-Internucleotide Linkage
  misc_feature (1)..(8): 2'-O-Methyl
  misc_feature (12)..(12): 2'-O-Methyl
  misc_feature (14)..(26): 2'-O-Methyl
  misc_feature (28)..(29): 2'-O-Methyl
  misc_feature (31)..(36): 2'-O-Methyl
  misc_feature (9)..(9): 2'-deoxy-2'-C-Allyl
  misc_feature (30)..(30): n stands for inosine
  misc_feature (37)..(37): n stands for inverted deoxyabasic derivative
caauggacugaugaggccguuaggccgaanagaagun

SEQ ID NO: 3853 - RNA, 37 nt, Artificial Sequence
  Description of Artificial Sequence:  Nucleic Acid
  misc_feature (1)..(4): Phosphorothioate 3'-Internucleotide Linkage
  misc_feature (1)..(8): 2'-O-Methyl
  misc_feature (12)..(12): 2'-O-Methyl
  misc_feature (14)..(26): 2'-O-Methyl
  misc_feature (28)..(29): 2'-O-Methyl
  misc_feature (31)..(36): 2'-O-Methyl
  misc_feature (9)..(9): 2'-deoxy-2'-C-Allyl
  misc_feature (30)..(30): n stands for inosine
  misc_feature (37)..(37): n stands for inverted deoxyabasic derivative
gcaauggcugaugaggccguuaggccgaangagaagn

SEQ ID NO: 3854 - RNA, 37 nt, Artificial Sequence
  Description of Artificial Sequence:  Nucleic Acid
  misc_feature (1)..(4): Phosphorothioate 3'-Internucleotide Linkage
  misc_feature (1)..(8): 2'-O-Methyl
  misc_feature (12)..(12): 2'-O-Methyl
  misc_feature (14)..(26): 2'-O-Methyl
  misc_feature (28)..(29): 2'-O-Methyl
  misc_feature (31)..(36): 2'-O-Methyl
  misc_feature (9)..(9): 2'-deoxy-2'-C-Allyl
  misc_feature (30)..(30): n stands for inosine
  misc_feature (37)..(37): n stands for inverted deoxyabasic derivative
ccgcaaucugaugaggccguuaggccgaanaggagan

SEQ ID NO: 3855 - RNA, 35 nt, Artificial Sequence
  Description of Artificial Sequence:  Nucleic Acid
  misc_feature (1)..(4): Phosphorothioate 3'-Internucleotide Linkage
  misc_feature (1)..(7): 2'-O-Methyl
  misc_feature (11)..(11): 2'-O-Methyl
  misc_feature (13)..(25): 2'-O-Methyl
  misc_feature (27)..(28): 2'-O-Methyl
  misc_feature (30)..(34): 2'-O-Methyl
  misc_feature (8)..(8): 2'-deoxy-2'-C-Allyl
  misc_feature (29)..(29): n stands for inosine
  misc_feature (35)..(35): n stands for inverted deoxyabasic derivative
ccgcaacugaugaggccguuaggccgaangaggan

SEQ ID NO: 3856 - RNA, 35 nt, Artificial Sequence
  Description of Artificial Sequence:  Nucleic Acid
  misc_feature (1)..(4): Phosphorothioate 3'-Internucleotide Linkage
  misc_feature (1)..(7): 2'-O-Methyl
  misc_feature (11)..(11): 2'-O-Methyl
  misc_feature (13)..(25): 2'-O-Methyl
  misc_feature (27)..(28): 2'-O-Methyl
  misc_feature (30)..(34): 2'-O-Methyl
  misc_feature (8)..(8): 2'-deoxy-2'-C-Allyl
  misc_feature (29)..(29): n stands for inosine
  misc_feature (35)..(35): n stands for inverted deoxyabasic derivative
aguccacugaugaggccguuaggccgaanuccgcn

SEQ ID NO: 3857 - RNA, 37 nt, Artificial Sequence
  Description of Artificial Sequence:  Nucleic Acid
  misc_feature (1)..(4): Phosphorothioate 3'-Internucleotide Linkage
  misc_feature (1)..(8): 2'-O-Methyl
  misc_feature (12)..(12): 2'-O-Methyl
  misc_feature (14)..(26): 2'-O-Methyl
  misc_feature (28)..(29): 2'-O-Methyl
  misc_feature (31)..(36): 2'-O-Methyl
  misc_feature (9)..(9): 2'-deoxy-2'-C-Allyl
  misc_feature (30)..(30): n stands for inosine
  misc_feature (37)..(37): n stands for inverted deoxyabasic derivative
aaguccacugaugaggccguuaggccgaanuccgcan

SEQ ID NO: 3858 - RNA, 35 nt, Artificial Sequence
  Description of Artificial Sequence:  Nucleic Acid
  misc_feature (1)..(4): Phosphorothioate 3'-Internucleotide Linkage
  misc_feature (1)..(7): 2'-O-Methyl
  misc_feature (11)..(11): 2'-O-Methyl
  misc_feature (13)..(25): 2'-O-Methyl
  misc_feature (27)..(28): 2'-O-Methyl
  misc_feature (30)..(34): 2'-O-Methyl
  misc_feature (8)..(8): 2'-deoxy-2'-C-Allyl
  misc_feature (29)..(29): n stands for inosine
  misc_feature (35)..(35): n stands for inverted deoxyabasic derivative
aggagccugaugaggccguuaggccgaanaucugn

SEQ ID NO: 3859 - RNA, 37 nt, Artificial Sequence
  Description of Artificial Sequence:  Nucleic Acid
  misc_feature (1)..(4): Phosphorothioate 3'-Internucleotide Linkage
  misc_feature (1)..(8): 2'-O-Methyl
  misc_feature (12)..(12): 2'-O-Methyl
  misc_feature (14)..(26): 2'-O-Methyl
  misc_feature (28)..(29): 2'-O-Methyl
  misc_feature (31)..(36): 2'-O-Methyl
  misc_feature (9)..(9): 2'-deoxy-2'-C-Allyl
  misc_feature (30)..(30): n stands for inosine
  misc_feature (37)..(37): n stands for inverted deoxyabasic derivative
uaggagccugaugaggccguuaggccgaanaucugan

SEQ ID NO: 3860 - RNA, 35 nt, Artificial Sequence
  Description of Artificial Sequence:  Nucleic Acid
  misc_feature (1)..(4): Phosphorothioate 3'-Internucleotide Linkage
  misc_feature (1)..(7): 2'-O-Methyl
  misc_feature (11)..(11): 2'-O-Methyl
  misc_feature (13)..(25): 2'-O-Methyl
  misc_feature (27)..(28): 2'-O-Methyl
  misc_feature (30)..(34): 2'-O-Methyl
  misc_feature (8)..(8): 2'-deoxy-2'-C-Allyl
  misc_feature (29)..(29): n stands for inosine
  misc_feature (35)..(35): n stands for inverted deoxyabasic derivative
agcaagcugaugaggccguuaggccgaanuccaan

SEQ ID NO: 3861 - RNA, 35 nt, Artificial Sequence
  Description of Artificial Sequence:  Nucleic Acid
  misc_feature (1)..(4): Phosphorothioate 3'-Internucleotide Linkage
  misc_feature (1)..(7): 2'-O-Methyl
  misc_feature (11)..(11): 2'-O-Methyl
  misc_feature (13)..(25): 2'-O-Methyl
  misc_feature (27)..(28): 2'-O-Methyl
  misc_feature (30)..(34): 2'-O-Methyl
  misc_feature (8)..(8): 2'-deoxy-2'-C-Allyl
  misc_feature (29)..(29): n stands for inosine
  misc_feature (35)..(35): n stands for inverted deoxyabasic derivative
agagcacugaugaggccguuaggccgaanaguccn

SEQ ID NO: 3862 - RNA, 37 nt, Artificial Sequence
  Description of Artificial Sequence:  Nucleic Acid
  misc_feature (1)..(4): Phosphorothioate 3'-Internucleotide Linkage
  misc_feature (1)..(8): 2'-O-Methyl
  misc_feature (12)..(12): 2'-O-Methyl
  misc_feature (14)..(26): 2'-O-Methyl
  misc_feature (28)..(29): 2'-O-Methyl
  misc_feature (31)..(36): 2'-O-Methyl
  misc_feature (9)..(9): 2'-deoxy-2'-C-Allyl
  misc_feature (30)..(30): n stands for inosine
  misc_feature (37)..(37): n stands for inverted deoxyabasic derivative
aagagcacugaugaggccguuaggccgaanaguccan

SEQ ID NO: 3863 - RNA, 35 nt, Artificial Sequence
  Description of Artificial Sequence:  Nucleic Acid
  misc_feature (1)..(4): Phosphorothioate 3'-Internucleotide Linkage
  misc_feature (1)..(7): 2'-O-Methyl
  misc_feature (11)..(11): 2'-O-Methyl
  misc_feature (13)..(25): 2'-O-Methyl
  misc_feature (27)..(28): 2'-O-Methyl
  misc_feature (30)..(34): 2'-O-Methyl
  misc_feature (8)..(8): 2'-deoxy-2'-C-Allyl
  misc_feature (29)..(29): n stands for inosine
  misc_feature (35)..(35): n stands for inverted deoxyabasic derivative
agaaagcugaugaggccguuaggccgaancaagan

SEQ ID NO: 3864 - RNA, 37 nt, Artificial Sequence
  Description of Artificial Sequence:  Nucleic Acid
  misc_feature (1)..(4): Phosphorothioate 3'-Internucleotide Linkage
  misc_feature (1)..(8): 2'-O-Methyl
  misc_feature (12)..(12): 2'-O-Methyl
  misc_feature (14)..(26): 2'-O-Methyl
  misc_feature (28)..(29): 2'-O-Methyl
  misc_feature (31)..(36): 2'-O-Methyl
  misc_feature (9)..(9): 2'-deoxy-2'-C-Allyl
  misc_feature (30)..(30): n stands for inosine
  misc_feature (37)..(37): n stands for inverted deoxyabasic derivative
uagaaagcugaugaggccguuaggccgaancaagagn

SEQ ID NO: 3865 - RNA, 35 nt, Artificial Sequence
  Description of Artificial Sequence:  Nucleic Acid
  misc_feature (1)..(4): Phosphorothioate 3'-Internucleotide Linkage
  misc_feature (1)..(7): 2'-O-Methyl
  misc_feature (11)..(11): 2'-O-Methyl
  misc_feature (13)..(25): 2'-O-Methyl
  misc_feature (27)..(28): 2'-O-Methyl
  misc_feature (30)..(34): 2'-O-Methyl
  misc_feature (8)..(8): 2'-deoxy-2'-C-Allyl
  misc_feature (29)..(29): n stands for inosine
  misc_feature (35)..(35): n stands for inverted deoxyabasic derivative
ugccgucuagugacgccguuaggcggaancauagn

SEQ ID NO: 3866 - RNA, 37 nt, Artificial Sequence
  Description of Artificial Sequence:  Nucleic Acid
  misc_feature (1)..(4): Phosphorothioate 3'-Internucleotide Linkage
  misc_feature (1)..(8): 2'-O-Methyl
  misc_feature (12)..(12): 2'-O-Methyl
  misc_feature (14)..(26): 2'-O-Methyl
  misc_feature (28)..(29): 2'-O-Methyl
  misc_feature (31)..(36): 2'-O-Methyl
  misc_feature (9)..(9): 2'-deoxy-2'-C-Allyl
  misc_feature (30)..(30): n stands for inosine
  misc_feature (37)..(37): n stands for inverted deoxyabasic derivative
uugaccccuagugacgccguuaggcggaangagcaun

SEQ ID NO: 3867 - RNA, 36 nt, Artificial Sequence
  Description of Artificial Sequence:  Nucleic Acid
  misc_feature (1)..(4): Phosphorothioate 3'-Internucleotide Linkage
  misc_feature (1)..(16): 2'-O-Methyl
  misc_feature (18)..(23): 2'-O-Methyl
  misc_feature (25)..(26): 2'-O-Methyl
  misc_feature (28)..(35): 2'-O-Methyl
  misc_feature (17)..(17): 2'-deoxy-2'-Amino
  misc_feature (27)..(27): 2'-deoxy-2'-Amino
  misc_feature (36)..(36): n stands for inverted deoxyabasic derivative
uguguaggccgaaaggcgagugaggucucauugaun

SEQ ID NO: 3868 - RNA, 34 nt, Artificial Sequence
  Description of Artificial Sequence:  Nucleic Acid
  misc_feature (1)..(4): Phosphorothioate 3'-Internucleotide Linkage
  misc_feature (1)..(15): 2'-O-Methyl
  misc_feature (17)..(22): 2'-O-Methyl
  misc_feature (23)..(24): 2'-O-Methyl
  misc_feature (26)..(32): 2'-O-Methyl
  misc_feature (16)..(16): 2'-deoxy-2'-Amino
  misc_feature (25)..(25): 2'-deoxy-2'-Amino
  misc_feature (33)..(33): n stands for inverted deoxyabasic derivative
uucacagccgaaaggcgagugaggucuacuggan

SEQ ID NO: 3869 - RNA, 36 nt, Artificial Sequence
  Description of Artificial Sequence:  Nucleic Acid
  misc_feature (1)..(4): Phosphorothioate 3'-Internucleotide Linkage
  misc_feature (1)..(16): 2'-O-Methyl
  misc_feature (18)..(23): 2'-O-Methyl
  misc_feature (25)..(26): 2'-O-Methyl
  misc_feature (28)..(35): 2'-O-Methyl
  misc_feature (17)..(17): 2'-deoxy-2'-Amino
  misc_feature (27)..(27): 2'-deoxy-2'-Amino
  misc_feature (36)..(36): n stands for inverted deoxyabasic derivative
cuucacagccgaaaggcgagugaggucuacuggaun

SEQ ID NO: 3870 - RNA, 36 nt, Artificial Sequence
  Description of Artificial Sequence:  Nucleic Acid
  misc_feature (1)..(4): Phosphorothioate 3'-Internucleotide Linkage
  misc_feature (1)..(16): 2'-O-Methyl
  misc_feature (18)..(23): 2'-O-Methyl
  misc_feature (25)..(26): 2'-O-Methyl
  misc_feature (28)..(35): 2'-O-Methyl
  misc_feature (17)..(17): 2'-deoxy-2'-Amino
  misc_feature (27)..(27): 2'-deoxy-2'-Amino
  misc_feature (36)..(36): n stands for inverted deoxyabasic derivative
uucuucagccgaaaggcgagugaggucuacacuggn

SEQ ID NO: 3871 - RNA, 34 nt, Artificial Sequence
  Description of Artificial Sequence:  Nucleic Acid
  misc_feature (1)..(4): Phosphorothioate 3'-Internucleotide Linkage
  misc_feature (1)..(15): 2'-O-Methyl
  misc_feature (17)..(22): 2'-O-Methyl
  misc_feature (23)..(24): 2'-O-Methyl
  misc_feature (26)..(32): 2'-O-Methyl
  misc_feature (16)..(16): 2'-deoxy-2'-Amino
  misc_feature (25)..(25): 2'-deoxy-2'-Amino
  misc_feature (33)..(33): n stands for inverted deoxyabasic derivative
cugucagccgaaaggcgagugaggucucuggaan

SEQ ID NO: 3872 - RNA, 36 nt, Artificial Sequence
  Description of Artificial Sequence:  Nucleic Acid
  misc_feature (1)..(4): Phosphorothioate 3'-Internucleotide Linkage
  misc_feature (1)..(16): 2'-O-Methyl
  misc_feature (18)..(23): 2'-O-Methyl
  misc_feature (25)..(26): 2'-O-Methyl
  misc_feature (28)..(35): 2'-O-Methyl
  misc_feature (17)..(17): 2'-deoxy-2'-Amino
  misc_feature (27)..(27): 2'-deoxy-2'-Amino
  misc_feature (36)..(36): n stands for inverted deoxyabasic derivative
acugucagccgaaaggcgagugaggucucuggaagn

SEQ ID NO: 3873 - RNA, 34 nt, Artificial Sequence
  Description of Artificial Sequence:  Nucleic Acid
  misc_feature (1)..(4): Phosphorothioate 3'-Internucleotide Linkage
  misc_feature (1)..(15): 2'-O-Methyl
  misc_feature (17)..(22): 2'-O-Methyl
  misc_feature (23)..(24): 2'-O-Methyl
  misc_feature (26)..(32): 2'-O-Methyl
  misc_feature (16)..(16): 2'-deoxy-2'-Amino
  misc_feature (25)..(25): 2'-deoxy-2'-Amino
  misc_feature (33)..(33): n stands for inverted deoxyabasic derivative
cccgcagccgaaaggcgagugaggucuugucacn

SEQ ID NO: 3874 - RNA, 36 nt, Artificial Sequence
  Description of Artificial Sequence:  Nucleic Acid
  misc_feature (1)..(4): Phosphorothioate 3'-Internucleotide Linkage
  misc_feature (1)..(16): 2'-O-Methyl
  misc_feature (18)..(23): 2'-O-Methyl
  misc_feature (25)..(26): 2'-O-Methyl
  misc_feature (28)..(35): 2'-O-Methyl
  misc_feature (17)..(17): 2'-deoxy-2'-Amino
  misc_feature (27)..(27): 2'-deoxy-2'-Amino
  misc_feature (36)..(36): n stands for inverted deoxyabasic derivative
ucccgcagccgaaaggcgagugaggucuugucaccn

SEQ ID NO: 3875 - RNA, 34 nt, Artificial Sequence
  Description of Artificial Sequence:  Nucleic Acid
  misc_feature (1)..(4): Phosphorothioate 3'-Internucleotide Linkage
  misc_feature (1)..(15): 2'-O-Methyl
  misc_feature (17)..(22): 2'-O-Methyl
  misc_feature (23)..(24): 2'-O-Methyl
  misc_feature (26)..(32): 2'-O-Methyl
  misc_feature (16)..(16): 2'-deoxy-2'-Amino
  misc_feature (25)..(25): 2'-deoxy-2'-Amino
  misc_feature (33)..(33): n stands for inverted deoxyabasic derivative
gucccggccgaaaggcgagugaggucuacugucn

SEQ ID NO: 3876 - RNA, 36 nt, Artificial Sequence
  Description of Artificial Sequence:  Nucleic Acid
  misc_feature (1)..(4): Phosphorothioate 3'-Internucleotide Linkage
  misc_feature (1)..(16): 2'-O-Methyl
  misc_feature (18)..(23): 2'-O-Methyl
  misc_feature (25)..(26): 2'-O-Methyl
  misc_feature (28)..(35): 2'-O-Methyl
  misc_feature (17)..(17): 2'-deoxy-2'-Amino
  misc_feature (27)..(27): 2'-deoxy-2'-Amino
  misc_feature (36)..(36): n stands for inverted deoxyabasic derivative
ggucccggccgaaaggcgagugaggucuacugucan

SEQ ID NO: 3877 - RNA, 34 nt, Artificial Sequence
  Description of Artificial Sequence:  Nucleic Acid
  misc_feature (1)..(4): Phosphorothioate 3'-Internucleotide Linkage
  misc_feature (1)..(15): 2'-O-Methyl
  misc_feature (17)..(22): 2'-O-Methyl
  misc_feature (23)..(24): 2'-O-Methyl
  misc_feature (26)..(32): 2'-O-Methyl
  misc_feature (16)..(16): 2'-deoxy-2'-Amino
  misc_feature (25)..(25): 2'-deoxy-2'-Amino
  misc_feature (33)..(33): n stands for inverted deoxyabasic derivative
gcucgggccgaaaggcgagugaggucuaguguun

SEQ ID NO: 3878 - RNA, 36 nt, Artificial Sequence
  Description of Artificial Sequence:  Nucleic Acid
  misc_feature (1)..(4): Phosphorothioate 3'-Internucleotide Linkage
  misc_feature (1)..(16): 2'-O-Methyl
  misc_feature (18)..(23): 2'-O-Methyl
  misc_feature (25)..(26): 2'-O-Methyl
  misc_feature (28)..(35): 2'-O-Methyl
  misc_feature (17)..(17): 2'-deoxy-2'-Amino
  misc_feature (27)..(27): 2'-deoxy-2'-Amino
  misc_feature (36)..(36): n stands for inverted deoxyabasic derivative
agcucgggccgaaaggcgagugaggucuaguguugn

SEQ ID NO: 3879 - RNA, 34 nt, Artificial Sequence
  Description of Artificial Sequence:  Nucleic Acid
  misc_feature (1)..(4): Phosphorothioate 3'-Internucleotide Linkage
  misc_feature (1)..(15): 2'-O-Methyl
  misc_feature (17)..(22): 2'-O-Methyl
  misc_feature (23)..(24): 2'-O-Methyl
  misc_feature (26)..(32): 2'-O-Methyl
  misc_feature (16)..(16): 2'-deoxy-2'-Amino
  misc_feature (25)..(25): 2'-deoxy-2'-Amino
  misc_feature (33)..(33): n stands for inverted deoxyabasic derivative
cuugaggccgaaaggcgagugaggucuucggcan

SEQ ID NO: 3880 - RNA, 36 nt, Artificial Sequence
  Description of Artificial Sequence:  Nucleic Acid
  misc_feature (1)..(4): Phosphorothioate 3'-Internucleotide Linkage
  misc_feature (1)..(16): 2'-O-Methyl
  misc_feature (18)..(23): 2'-O-Methyl
  misc_feature (25)..(26): 2'-O-Methyl
  misc_feature (28)..(35): 2'-O-Methyl
  misc_feature (17)..(17): 2'-deoxy-2'-Amino
  misc_feature (27)..(27): 2'-deoxy-2'-Amino
  misc_feature (36)..(36): n stands for inverted deoxyabasic derivative
ucuugaggccgaaaggcgagugaggucuucggcagn

SEQ ID NO: 3881 - RNA, 34 nt, Artificial Sequence
  Description of Artificial Sequence:  Nucleic Acid
  misc_feature (1)..(4): Phosphorothioate 3'-Internucleotide Linkage
  misc_feature (1)..(15): 2'-O-Methyl
  misc_feature (17)..(22): 2'-O-Methyl
  misc_feature (23)..(24): 2'-O-Methyl
  misc_feature (26)..(32): 2'-O-Methyl
  misc_feature (16)..(16): 2'-deoxy-2'-Amino
  misc_feature (25)..(25): 2'-deoxy-2'-Amino
  misc_feature (33)..(33): n stands for inverted deoxyabasic derivative
ucugcagccgaaaggcgagugaggucucuugucn

SEQ ID NO: 3882 - RNA, 36 nt, Artificial Sequence
  Description of Artificial Sequence:  Nucleic Acid
  misc_feature (1)..(4): Phosphorothioate 3'-Internucleotide Linkage
  misc_feature (1)..(16): 2'-O-Methyl
  misc_feature (18)..(23): 2'-O-Methyl
  misc_feature (25)..(26): 2'-O-Methyl
  misc_feature (28)..(35): 2'-O-Methyl
  misc_feature (17)..(17): 2'-deoxy-2'-Amino
  misc_feature (27)..(27): 2'-deoxy-2'-Amino
  misc_feature (36)..(36): n stands for inverted deoxyabasic derivative
cuuucuggccgaaaggcgagugaggucuaccuugun

SEQ ID NO: 3883 - RNA, 34 nt, Artificial Sequence
  Description of Artificial Sequence:  Nucleic Acid
  misc_feature (1)..(4): Phosphorothioate 3'-Internucleotide Linkage
  misc_feature (1)..(15): 2'-O-Methyl
  misc_feature (17)..(22): 2'-O-Methyl
  misc_feature (23)..(24): 2'-O-Methyl
  misc_feature (26)..(32): 2'-O-Methyl
  misc_feature (16)..(16): 2'-deoxy-2'-Amino
  misc_feature (25)..(25): 2'-deoxy-2'-Amino
  misc_feature (33)..(33): n stands for inverted deoxyabasic derivative
gaaauagccgaaaggcgagugaggucuaccucan

SEQ ID NO: 3884 - RNA, 34 nt, Artificial Sequence
  Description of Artificial Sequence:  Nucleic Acid
  misc_feature (1)..(4): Phosphorothioate 3'-Internucleotide Linkage
  misc_feature (1)..(15): 2'-O-Methyl
  misc_feature (17)..(22): 2'-O-Methyl
  misc_feature (23)..(24): 2'-O-Methyl
  misc_feature (26)..(32): 2'-O-Methyl
  misc_feature (16)..(16): 2'-deoxy-2'-Amino
  misc_feature (25)..(25): 2'-deoxy-2'-Amino
  misc_feature (33)..(33): n stands for inverted deoxyabasic derivative
ggaacagccgaaaggcgagugaggucuaauggcn

SEQ ID NO: 3885 - RNA, 36 nt, Artificial Sequence
  Description of Artificial Sequence:  Nucleic Acid
  misc_feature (1)..(4): Phosphorothioate 3'-Internucleotide Linkage
  misc_feature (1)..(16): 2'-O-Methyl
  misc_feature (18)..(23): 2'-O-Methyl
  misc_feature (25)..(26): 2'-O-Methyl
  misc_feature (28)..(35): 2'-O-Methyl
  misc_feature (17)..(17): 2'-deoxy-2'-Amino
  misc_feature (27)..(27): 2'-deoxy-2'-Amino
  misc_feature (36)..(36): n stands for inverted deoxyabasic derivative
cggaacagccgaaaggcgagugaggucuaauggccn

SEQ ID NO: 3886 - RNA, 36 nt, Artificial Sequence
  Description of Artificial Sequence:  Nucleic Acid
  misc_feature (1)..(4): Phosphorothioate 3'-Internucleotide Linkage
  misc_feature (1)..(16): 2'-O-Methyl
  misc_feature (18)..(23): 2'-O-Methyl
  misc_feature (25)..(26): 2'-O-Methyl
  misc_feature (28)..(35): 2'-O-Methyl
  misc_feature (17)..(17): 2'-deoxy-2'-Amino
  misc_feature (27)..(27): 2'-deoxy-2'-Amino
  misc_feature (36)..(36): n stands for inverted deoxyabasic derivative
uccggaagccgaaaggcgagugaggucuacaauggn

SEQ ID NO: 3887 - RNA, 34 nt, Artificial Sequence
  Description of Artificial Sequence:  Nucleic Acid
  misc_feature (1)..(4): Phosphorothioate 3'-Internucleotide Linkage
  misc_feature (1)..(15): 2'-O-Methyl
  misc_feature (17)..(22): 2'-O-Methyl
  misc_feature (23)..(24): 2'-O-Methyl
  misc_feature (26)..(32): 2'-O-Methyl
  misc_feature (16)..(16): 2'-deoxy-2'-Amino
  misc_feature (25)..(25): 2'-deoxy-2'-Amino
  misc_feature (33)..(33): n stands for inverted deoxyabasic derivative
caucaggccgaaaggcgagugaggucuaugggcn

SEQ ID NO: 3888 - RNA, 36 nt, Artificial Sequence
  Description of Artificial Sequence:  Nucleic Acid
  misc_feature (1)..(4): Phosphorothioate 3'-Internucleotide Linkage
  misc_feature (1)..(16): 2'-O-Methyl
  misc_feature (18)..(23): 2'-O-Methyl
  misc_feature (25)..(26): 2'-O-Methyl
  misc_feature (28)..(35): 2'-O-Methyl
  misc_feature (17)..(17): 2'-deoxy-2'-Amino
  misc_feature (27)..(27): 2'-deoxy-2'-Amino
  misc_feature (36)..(36): n stands for inverted deoxyabasic derivative
uuaggaggccgaaaggcgagugaggucuugaucugn

SEQ ID NO: 3889 - RNA, 34 nt, Artificial Sequence
  Description of Artificial Sequence:  Nucleic Acid
  misc_feature (1)..(4): Phosphorothioate 3'-Internucleotide Linkage
  misc_feature (1)..(15): 2'-O-Methyl
  misc_feature (17)..(22): 2'-O-Methyl
  misc_feature (23)..(24): 2'-O-Methyl
  misc_feature (26)..(32): 2'-O-Methyl
  misc_feature (16)..(16): 2'-deoxy-2'-Amino
  misc_feature (25)..(25): 2'-deoxy-2'-Amino
  misc_feature (33)..(33): n stands for inverted deoxyabasic derivative
aaagaggccgaaaggcgagugaggucuaagagun

SEQ ID NO: 3890 - RNA, 36 nt, Artificial Sequence
  Description of Artificial Sequence:  Nucleic Acid
  misc_feature (1)..(4): Phosphorothioate 3'-Internucleotide Linkage
  misc_feature (1)..(16): 2'-O-Methyl
  misc_feature (18)..(23): 2'-O-Methyl
  misc_feature (25)..(26): 2'-O-Methyl
  misc_feature (28)..(35): 2'-O-Methyl
  misc_feature (17)..(17): 2'-deoxy-2'-Amino
  misc_feature (27)..(27): 2'-deoxy-2'-Amino
  misc_feature (36)..(36): n stands for inverted deoxyabasic derivative
gaaagaggccgaaaggcgagugaggucuaagagucn

SEQ ID NO: 3891 - RNA, 34 nt, Artificial Sequence
  Description of Artificial Sequence:  Nucleic Acid
  misc_feature (1)..(4): Phosphorothioate 3'-Internucleotide Linkage
  misc_feature (1)..(15): 2'-O-Methyl
  misc_feature (17)..(17): 2'-O-Methyl
  misc_feature (19)..(20): 2'-O-Methyl
  misc_feature (22)..(33): 2'-O-Methyl
  misc_feature (16)..(16): 2'-deoxy-2'-Amino
  misc_feature (18)..(18): 2'-deoxy-2'-Amino
  misc_feature (34)..(34): n stands for inverted deoxyabasic derivative
aauucggccgaaaggcucuggagugaggucggan

SEQ ID NO: 3892 - RNA, 36 nt, Artificial Sequence
  Description of Artificial Sequence:  Nucleic Acid
  misc_feature (1)..(4): Phosphorothioate 3'-Internucleotide Linkage
  misc_feature (1)..(16): 2'-O-Methyl
  misc_feature (18)..(18): 2'-O-Methyl
  misc_feature (20)..(21): 2'-O-Methyl
  misc_feature (23)..(35): 2'-O-Methyl
  misc_feature (17)..(17): 2'-deoxy-2'-Amino
  misc_feature (19)..(19): 2'-deoxy-2'-Amino
  misc_feature (36)..(36): n stands for inverted deoxyabasic derivative
gcacggagccgaaaggcucuggagugaggucaugun

SEQ ID NO: 3893 - RNA, 37 nt, Artificial Sequence
  Description of Artificial Sequence:  Nucleic Acid
  misc_feature (1)..(7): 2'-O-Methyl
  misc_feature (15)..(26): 2'-O-Methyl
  misc_feature (31)..(36): 2'-O-Methyl
  misc_feature (37)..(37): n stands for inverted deoxyabasic derivative
uuccuaccugaugaggccguuaggccgaaagcucgun

SEQ ID NO: 3894 - RNA, 37 nt, Artificial Sequence
  Description of Artificial Sequence:  Nucleic Acid
  misc_feature (1)..(7): 2'-O-Methyl
  misc_feature (15)..(26): 2'-O-Methyl
  misc_feature (31)..(36): 2'-O-Methyl
  misc_feature (37)..(37): n stands for inverted deoxyabasic derivative
gaugagacugaugaggccguuaggccgaaaggacagn

SEQ ID NO: 3895 - RNA, 37 nt, Artificial Sequence
  Description of Artificial Sequence:  Nucleic Acid
  misc_feature (1)..(7): 2'-O-Methyl
  misc_feature (15)..(26): 2'-O-Methyl
  misc_feature (31)..(36): 2'-O-Methyl
  misc_feature (37)..(37): n stands for inverted deoxyabasic derivative
acaccuccugaugaggccguuaggccgaaauguccun

SEQ ID NO: 3896 - RNA, 37 nt, Artificial Sequence
  Description of Artificial Sequence:  Nucleic Acid
  misc_feature (1)..(7): 2'-O-Methyl
  misc_feature (15)..(26): 2'-O-Methyl
  misc_feature (31)..(36): 2'-O-Methyl
  misc_feature (37)..(37): n stands for inverted deoxyabasic derivative
ccgcugacugaugaggccguuaggccgaaaggacucn

SEQ ID NO: 3897 - RNA, 37 nt, Artificial Sequence
  Description of Artificial Sequence:  Nucleic Acid
  misc_feature (1)..(7): 2'-O-Methyl
  misc_feature (15)..(26): 2'-O-Methyl
  misc_feature (31)..(36): 2'-O-Methyl
  misc_feature (37)..(37): n stands for inverted deoxyabasic derivative
gaguagacugaugaggccguuaggccgaaagagcaan

SEQ ID NO: 3898 - RNA, 37 nt, Artificial Sequence
  Description of Artificial Sequence:  Nucleic Acid
  misc_feature (1)..(7): 2'-O-Methyl
  misc_feature (15)..(26): 2'-O-Methyl
  misc_feature (31)..(36): 2'-O-Methyl
  misc_feature (30)..(30): n stands for inosine
  misc_feature (37)..(37): n stands for inverted deoxyabasic derivative
cuguggacugaugaggccguuaggccgaancagcggn

SEQ ID NO: 3899 - RNA, 37 nt, Artificial Sequence
  Description of Artificial Sequence:  Nucleic Acid
  misc_feature (1)..(7): 2'-O-Methyl
  misc_feature (15)..(26): 2'-O-Methyl
  misc_feature (31)..(36): 2'-O-Methyl
  misc_feature (30)..(30): n stands for inosine
  misc_feature (37)..(37): n stands for inverted deoxyabasic derivative
augagaacugaugaggccguuaggccgaangacaggn

SEQ ID NO: 3900 - RNA, 37 nt, Artificial Sequence
  Description of Artificial Sequence:  Nucleic Acid
  misc_feature (1)..(7): 2'-O-Methyl
  misc_feature (15)..(26): 2'-O-Methyl
  misc_feature (31)..(36): 2'-O-Methyl
  misc_feature (30)..(30): n stands for inosine
  misc_feature (37)..(37): n stands for inverted deoxyabasic derivative
gugcucacugaugaggccguuaggccgaangaugacn

SEQ ID NO: 3901 - RNA, 37 nt, Artificial Sequence
  Description of Artificial Sequence:  Nucleic Acid
  misc_feature (1)..(7): 2'-O-Methyl
  misc_feature (15)..(26): 2'-O-Methyl
  misc_feature (31)..(36): 2'-O-Methyl
  misc_feature (30)..(30): n stands for inosine
  misc_feature (37)..(37): n stands for inverted deoxyabasic derivative
gcugauccugaugaggccguuaggccgaancccagan

SEQ ID NO: 3902 - RNA, 37 nt, Artificial Sequence
  Description of Artificial Sequence:  Nucleic Acid
  misc_feature (1)..(7): 2'-O-Methyl
  misc_feature (15)..(26): 2'-O-Methyl
  misc_feature (31)..(36): 2'-O-Methyl
  misc_feature (30)..(30): n stands for inosine
  misc_feature (37)..(37): n stands for inverted deoxyabasic derivative
uaggacucugaugaggccguuaggccgaangacaggn

SEQ ID NO: 3903 - RNA, 36 nt, Artificial Sequence
  Description of Artificial Sequence:  Nucleic Acid
  misc_feature (1)..(16): 2'-O-Methyl
  misc_feature (18)..(23): 2'-O-Methyl
  misc_feature (26)..(26): 2'-O-Methyl
  misc_feature (28)..(35): 2'-O-Methyl
  misc_feature (17)..(17): 2'-deoxy-2'-Amino
  misc_feature (27)..(27): 2'-deoxy-2'-Amino
  misc_feature (36)..(36): n stands for inverted deoxyabasic derivative
guggauggccgaaaggcgagugaggucuagcggucn

SEQ ID NO: 3904 - RNA, 36 nt, Artificial Sequence
  Description of Artificial Sequence:  Nucleic Acid
  misc_feature (1)..(16): 2'-O-Methyl
  misc_feature (18)..(23): 2'-O-Methyl
  misc_feature (26)..(26): 2'-O-Methyl
  misc_feature (28)..(35): 2'-O-Methyl
  misc_feature (17)..(17): 2'-deoxy-2'-Amino
  misc_feature (27)..(27): 2'-deoxy-2'-Amino
  misc_feature (36)..(36): n stands for inverted deoxyabasic derivative
ggucccggccgaaaggcgagugaggucuuucuucan

SEQ ID NO: 3905 - RNA, 36 nt, Artificial Sequence
  Description of Artificial Sequence:  Nucleic Acid
  misc_feature (1)..(16): 2'-O-Methyl
  misc_feature (18)..(23): 2'-O-Methyl
  misc_feature (26)..(26): 2'-O-Methyl
  misc_feature (28)..(35): 2'-O-Methyl
  misc_feature (17)..(17): 2'-deoxy-2'-Amino
  misc_feature (27)..(27): 2'-deoxy-2'-Amino
  misc_feature (36)..(36): n stands for inverted deoxyabasic derivative
ggagacagccgaaaggcgagugaggucugcacaggn

SEQ ID NO: 3906 - RNA, 36 nt, Artificial Sequence
  Description of Artificial Sequence:  Nucleic Acid
  misc_feature (1)..(16): 2'-O-Methyl
  misc_feature (18)..(23): 2'-O-Methyl
  misc_feature (26)..(26): 2'-O-Methyl
  misc_feature (28)..(35): 2'-O-Methyl
  misc_feature (17)..(17): 2'-deoxy-2'-Amino
  misc_feature (27)..(27): 2'-deoxy-2'-Amino
  misc_feature (36)..(36): n stands for inverted deoxyabasic derivative
auggagagccgaaaggcgagugaggucuacgcacan

SEQ ID NO: 3907 - RNA, 36 nt, Artificial Sequence
  Description of Artificial Sequence:  Nucleic Acid
  misc_feature (1)..(16): 2'-O-Methyl
  misc_feature (18)..(23): 2'-O-Methyl
  misc_feature (26)..(26): 2'-O-Methyl
  misc_feature (28)..(35): 2'-O-Methyl
  misc_feature (17)..(17): 2'-deoxy-2'-Amino
  misc_feature (27)..(27): 2'-deoxy-2'-Amino
  misc_feature (36)..(36): n stands for inverted deoxyabasic derivative
gcuaggagccgaaaggcgagugaggucuugggacan

SEQ ID NO: 3908 - DNA, 30 bp, Artificial Sequence
  Description of Artificial Sequence:  Nucleic Acid
  misc_feature (1)..(7): 2'-O-Methyl
  misc_feature (23)..(29): 2'-O-Methyl
  misc_feature (30)..(30): n stands for inverted deoxyabasic derivative
ggugguaggctagctacaacgacugugcun

SEQ ID NO: 3909 - DNA, 30 bp, Artificial Sequence
  Description of Artificial Sequence:  Nucleic Acid
  misc_feature (1)..(7): 2'-O-Methyl
  misc_feature (23)..(29): 2'-O-Methyl
  misc_feature (30)..(30): n stands for inverted deoxyabasic derivative
guagccaggctagctacaacgaugaucuun

SEQ ID NO: 3910 - DNA, 30 bp, Artificial Sequence
  Description of Artificial Sequence:  Nucleic Acid
  misc_feature (1)..(7): 2'-O-Methyl
  misc_feature (23)..(29): 2'-O-Methyl
  misc_feature (30)..(30): n stands for inverted deoxyabasic derivative
gucuggaggctagctacaacgagcgcugan

SEQ ID NO: 3911 - DNA, 30 bp, Artificial Sequence
  Description of Artificial Sequence:  Nucleic Acid
  misc_feature (1)..(7): 2'-O-Methyl
  misc_feature (23)..(29): 2'-O-Methyl
  misc_feature (30)..(30): n stands for inverted deoxyabasic derivative
ggagacaggctagctacaacgagcacaggn

SEQ ID NO: 3912 - DNA, 30 bp, Artificial Sequence
  Description of Artificial Sequence:  Nucleic Acid
  misc_feature (1)..(7): 2'-O-Methyl
  misc_feature (23)..(29): 2'-O-Methyl
  misc_feature (30)..(30): n stands for inverted deoxyabasic derivative
aaguccaggctagctacaacgaguccgcan

SEQ ID NO: 3913 - RNA, 47 nt, Artificial Sequence
  Description of Artificial Sequence:  Nucleic Acid
  misc_feature (1)..(7): 2'-O-Methyl
  misc_feature (9)..(18): 2'-O-Methyl
  misc_feature (24)..(35): 2'-O-Methyl
  misc_feature (40)..(46): 2'-O-Methyl
  misc_feature (19)..(23): 2'-deoxy-2'-Amino
  misc_feature (36)..(36): 2'-deoxy-2'-Amino
  misc_feature (47)..(47): n stands for inverted deoxyabasic derivative
gugguauggaggaaacucccuucaaggacaucguccgggugugcucn

SEQ ID NO: 3914 - RNA, 47 nt, Artificial Sequence
  Description of Artificial Sequence:  Nucleic Acid
  misc_feature (1)..(7): 2'-O-Methyl
  misc_feature (9)..(18): 2'-O-Methyl
  misc_feature (24)..(35): 2'-O-Methyl
  misc_feature (40)..(46): 2'-O-Methyl
  misc_feature (19)..(23): 2'-deoxy-2'-Amino
  misc_feature (36)..(36): 2'-deoxy-2'-Amino
  misc_feature (47)..(47): n stands for inverted deoxyabasic derivative
guuucucggaggaaacucccuucaaggacaucguccgggucaauccn

SEQ ID NO: 3915 - RNA, 47 nt, Artificial Sequence
  Description of Artificial Sequence:  Nucleic Acid
  misc_feature (1)..(7): 2'-O-Methyl
  misc_feature (9)..(18): 2'-O-Methyl
  misc_feature (24)..(35): 2'-O-Methyl
  misc_feature (40)..(46): 2'-O-Methyl
  misc_feature (19)..(23): 2'-deoxy-2'-Amino
  misc_feature (36)..(36): 2'-deoxy-2'-Amino
  misc_feature (47)..(47): n stands for inverted deoxyabasic derivative
aggucuuggaggaaacucccuucaaggacaucguccgggaucaucan

SEQ ID NO: 3916 - RNA, 47 nt, Artificial Sequence
  Description of Artificial Sequence:  Nucleic Acid
  misc_feature (1)..(7): 2'-O-Methyl
  misc_feature (9)..(18): 2'-O-Methyl
  misc_feature (24)..(35): 2'-O-Methyl
  misc_feature (40)..(46): 2'-O-Methyl
  misc_feature (19)..(23): 2'-deoxy-2'-Amino
  misc_feature (36)..(36): 2'-deoxy-2'-Amino
  misc_feature (47)..(47): n stands for inverted deoxyabasic derivative
gcucuccggaggaaacucccuucaaggacaucguccgggccacucun

SEQ ID NO: 3917 - RNA, 47 nt, Artificial Sequence
  Description of Artificial Sequence:  Nucleic Acid
  misc_feature (1)..(7): 2'-O-Methyl
  misc_feature (9)..(18): 2'-O-Methyl
  misc_feature (24)..(35): 2'-O-Methyl
  misc_feature (40)..(46): 2'-O-Methyl
  misc_feature (19)..(23): 2'-deoxy-2'-Amino
  misc_feature (36)..(36): 2'-deoxy-2'-Amino
  misc_feature (47)..(47): n stands for inverted deoxyabasic derivative
gccugcuggaggaaacucccuucaaggacaucguccgggucccccan

SEQ ID NO: 3918 - RNA, 15 nt, Artificial Sequence
  Description of Artificial Sequence:  Nucleic Acid
  misc_feature (1)..(6): n stands for a, c, g, or u
  misc_feature (9)..(15): n stands for a, c, g, or u
nnnnnnuhnnnnnnn

SEQ ID NO: 3919 - RNA, 36 nt, Artificial Sequence
  Description of Artificial Sequence:  Nucleic Acid
  misc_feature (1)..(7): n stands for a, c, g, or u
  misc_feature (16)..(18): n stands for a, c, g, or u
  misc_feature (23)..(25): n stands for a, c, g, or u
  misc_feature (31)..(36): n stands for a, c, g, or u
  misc_feature (1)..(8): 2'-O-Methyl
  misc_feature (12)..(12): 2'-O-Methyl
  misc_feature (14)..(26): 2'-O-Methyl
  misc_feature (28)..(29): 2'-O-Methyl
  misc_feature (31)..(36): 2'-O-Methyl
  misc_feature (9)..(9): 2'-deoxy-2'-C-Allyl
nnnnnnncugaugagnnngaaannncgaaannnnnn

SEQ ID NO: 3920 - RNA, 14 nt, Artificial Sequence
  Description of Artificial Sequence:  Nucleic Acid
  misc_feature (1)..(5): n stands for a, c, g, or u
  misc_feature (8)..(14): n stands for a, c, g, or u
nnnnnchnnnnnnn

SEQ ID NO: 3921 - RNA, 35 nt, Artificial Sequence
  Description of Artificial Sequence:  Nucleic Acid
  misc_feature (1)..(7): n stands for a, c, g, or u
  misc_feature (16)..(18): n stands for a, c, g, or u
  misc_feature (23)..(25): n stands for a, c, g, or u
  misc_feature (31)..(35): n stands for a, c, g, or u
  misc_feature (1)..(8): 2'-O-Methyl
  misc_feature (12)..(12): 2'-O-Methyl
  misc_feature (14)..(26): 2'-O-Methyl
  misc_feature (28)..(29): 2'-O-Methyl
  misc_feature (31)..(35): 2'-O-Methyl
  misc_feature (30)..(30): n stands for Inosine
  misc_feature (9)..(9): 2'-deoxy-2'-C-Allyl
nnnnnnncugaugagnnngaaannncgaannnnnn

SEQ ID NO: 3922 - RNA, 15 nt, Artificial Sequence
  Description of Artificial Sequence:  Nucleic Acid
  misc_feature (1)..(6): n stands for a, c, g, or u
  misc_feature (9)..(15): n stands for a, c, g, or u
nnnnnnygnnnnnnn

SEQ ID NO: 3923 - RNA, 35 nt, Artificial Sequence
  Description of Artificial Sequence:  Nucleic Acid
  misc_feature (1)..(7): n stands for a, c, g, or u
  misc_feature (29)..(35): n stands for a, c, g, or u
  misc_feature (1)..(8): 2'-O-Methyl
  misc_feature (13)..(16): 2'-O-Methyl
  misc_feature (18)..(35): 2'-O-Methyl
  misc_feature (11)..(11): Phosphorothioate 3'-Internucleotide Linkage
nnnnnnnugauggcaugcacuaugcgcgnnnnnnn

SEQ ID NO: 3924 - RNA, 48 nt, Artificial Sequence
  Description of Artificial Sequence:  Nucleic Acid
  misc_feature (1)..(8): 2'-O-Methyl
  misc_feature (12)..(21): 2'-O-Methyl
  misc_feature (32)..(37): 2'-O-Methyl
  misc_feature (44)..(48): 2'-O-Methyl
  misc_feature (9)..(10): 2'-deoxy-2'-amino
  misc_feature (22)..(26): 2'-deoxy-2'-amino
  misc_feature (38)..(40): 2'-deoxy-2'-amino
gugugcaaccggaggaaacucccuucaaggacgaaaguccgggacggg

SEQ ID NO: 3925 - RNA, 16 nt, Artificial Sequence
  Description of Artificial Sequence:  Nucleic Acid
gccguggguugcacac

SEQ ID NO: 3926 - RNA, 36 nt, Artificial Sequence
  Description of Artificial Sequence:  Nucleic Acid
  misc_feature (1)..(7): 2'-O-Methyl
  misc_feature (9)..(15): 2'-O-Methyl
  misc_feature (19)..(19): 2'-O-Methyl
  misc_feature (21)..(21): 2'-O-Methyl
  misc_feature (23)..(23): 2'-O-Methyl
  misc_feature (26)..(26): 2'-O-Methyl
  misc_feature (28)..(35): 2'-O-Methyl
  misc_feature (1)..(4): Phosphorothioate 3'-Internucleotide Linkage
  misc_feature (17)..(17): 2'-Deoxy-2'-Amino
  misc_feature (27)..(27): 2'-Deoxy-2'-Amino
  misc_feature (36)..(36): n stands for inverted deoxyabasic derivative
gugccuggccgaaaggcgagugaggucugccgcgcn

SEQ ID NO: 3927 - RNA, 15 nt, Artificial Sequence
  Description of Artificial Sequence:  Nucleic Acid
gcgcggcgcaggcac

SEQ ID NO: 3928 - DNA, 16 bp, Artificial Sequence
  Description of Artificial Sequence:  Nucleic Acid
rggctagctacaacga

SEQ ID NO: 3929 - RNA, 10 nt, Artificial Sequence
  Description of Artificial Sequence:  Nucleic acid
gccguuaggc
